(19) United States
(12) Patent Application Publication
(10) Pub. No.: US 2023/0279410 A1
(43) Pub. Date: Sep. 7, 2023

(54) TOPICAL APPLICATION OF POLYNUCLEOTIDE MOLECULES FOR IMPROVING YIELD TRAITS OF PLANTS

(71) Applicants: IMI TAMI INSTITUTE FOR RESEARCH & DEVELOPMENT LTD., Haifa (IL); PLANTARC BIO LTD., Raanana (IL)

(72) Inventors: Dror SHALITIN, Raanana (IL); Noam GRIMBERG, Kibutz Lehavot Haviva (IL); ltay DODEK, Yokne'am Illit (IL)

(73) Assignee: PLANTARC BIO LTD., Raanana (IL)

(21) Appl. No.: 17/909,900

(22) PCT Filed: Mar. 15, 2021
(86) PCT No.: PCT/IL2021/050283

§ 371 Date: Sep. 7, 2022

Related U.S. Application Data
(60) Provisional application No. 62/990,309, filed on Mar. 16, 2020.
(60) Provisional application No. 63/063,683, filed on Aug. 10, 2020.
(60) Provisional application No. 63/063,696, filed on Aug. 10, 2020.

(51) Int. Cl. C12N 15/82; A01H 6/46; A01H 6/54; A01H 6/20

(52) U.S. Cl. CPC C12N 15/8206; C12N 15/8218; C12N 15/8261; A01H 6/4636; A01H 6/542; A01H 6/20

(57) ABSTRACT

A composition including: (i) a ds RNA molecule of at least 18 contiguous nucleotides that are essentially identical or essentially complementary to a plant gene or a transcript of said plant gene; and (ii) a transfer agent that conditions a surface of a plant to permeation by the ds RNA molecule into cells of the plant; wherein permeation of the ds RNA molecule into cells of the plant causes a transient reduction in the expression of the gene and wherein the transient reduction in the expression of the gene causes a change in a yield-associated trait of the plant.

### SEQUENCE LISTING

[0001] A sequence listing in electronic (ASCII text file) format is filed with this application and incorporated herein by reference. The name of the ASCII text file is “Sequence_listing_v2.txt”;

[0002] the file was created on May 9, 2023; the size of the file is 2,626,261 bytes.

### BACKGROUND OF THE INVENTION

[0003] According to the United Nations Food and Agricultural Organization (UN FAO), the world's population will exceed 9.6 billion people by the year 2050, which will require significant improvements in agriculture to meet growing food demands. At the same time, conservation of resources, reduction in the use of fertilizers, pesticides, and herbicides, environmental sustainability, are increasingly important factors in how food is grown. There is a need for improved agricultural plants and farming practices that will enable an increased plant production using fewer resources, more environmentally sustainable inputs.

[0004] Yield is affected by various factors, such as the number and size of the plant organs, plant architecture (for example, the number of branches), seed filling, seed number, drought resistance, shattering, flowering and number of tillers, etc.

[0005] Today, crop performance is optimized primarily via technologies directed towards the interplay between crop genotype (e.g., plant breeding, genetically modified (GM) crops) and its surrounding environment (e.g., fertilizer, synthetic herbicides, pesticides). While these paradigms have assisted in doubling global food production in the past fifty years, yield growth rates have stalled in many major crops, driving an urgent need for novel solutions to crop yield improvement. In addition to their long development and regulatory timelines, public fears of GM-crops and synthetic chemicals have challenged their use in many key crops and countries, resulting in a lack of acceptance for many GM traits and the exclusion of GM crops and many synthetic chemistries from some global markets. Thus, there is a significant need for innovative, effective, environmentally-sustainable, and publicly-acceptable approaches to improve the yield.

### SUMMARY OF THE INVENTION

[0006] Provided herein are compositions and methods that provide increased yield in plants by suppressing expression of a yield-associated gene in a plant, by topically providing to the plant a composition comprising a polynucleotide molecule capable of hybridizing with the yield-associated gene or gene transcript and a transfer agent that conditions a surface of the plant to permeation by the polynucleotide molecule into cells of the plant, thereby improving a yield-associated trait of the plant. Non-limiting examples of yield-associated trait of the plant include: increased branching in the plant, grain size, increased number of panicles, increased number of tillers, increased seed, increase in a size of siliques of the plant, increase in the filling of the seed, increased seed number, increased heading, improved drought resistance, decreased shattering, decreased abscise tissue formation, decreased petals in the plant, late/early flowering, shortened/prolonged flowering period, delayed senescence, increased oil contents, improved oil composition, starch content, starch composition, carbohydrate content, carbohydrate composition, increased protein contents, improved protein composition, and any combination thereof. Each possibility is a separate embodiment.

[0007] According to some embodiments, the penetration of the polynucleotide molecule may cause a transient reduction in the expression of the gene, cause a non-permanent spatial and temporal effect on the plant and does not result in nor require the exogenous polynucleotide's integration into a chromosome of the plant. This approach has several advantages. First it circumvents the need in GMO legislation. Moreover, it is more sophisticated and an efficient approach as it is dynamic and allows user-determined application according to real-time needs, timing of the trait improvement and/or environmental conditions that need addressing. As a non-limiting example, during drought a farmer may decide to transiently inhibit expression of genes/transcripts to improve water stress resilience and to discontinue the inhibition once weather changes. As another non-limiting example, the farmer may decide to transiently inhibit genes/transcripts associated with early flowering of the plant in the event of unexpected rain, temperature change or the like.

[0008] Advantageously, the technology is applicable for use in various crops, including but not limited to corn, rice, soybean, cotton, canola, oilseed rape, tomato, potato, etc. and especially to crops with complex genomes such as wheat, strawberries or fruit-trees.

[0009] According to some embodiments, the polynucleotide molecules are provided in compositions that can permeate or be absorbed into living plant tissue to initiate systemic gene inhibition or regulation. In certain embodiments of the invention, the polynucleotide molecules ultimately provide to a plant an RNA (e.g. a dsRNA) or RNA-like molecule that is capable of hybridizing under physiological conditions in a plant cell to RNA transcribed from a target endogenous gene in the plant cell, thereby effecting (silencing or suppressing) expression of the target gene.

[0010] According to some embodiments, the silencing/suppressing of the target gene may directly improve the yield-associated trait of the plant. Alternatively, the silencing/suppressing of the target gene may indirectly improve the yield-associated trait of the plant. For example, silencing or suppression of the target gene, may change (increase or decrease) expression of another gene that improves the yield associated trait of the plant.

[0011] As a further important practical advantage, the topical application of the composition comprising the exogenous polynucleotide and the transfer agent does not require that the exogenous polynucleotide be physically bound to a particle, such as in biolistic-mediated introduction of polynucleotides associated with gold or tungsten particles into internal portions of a plant, plant part, or plant cell.

[0012] According to some embodiments, the polynucleotide molecules target the mRNA of the plant gene. According to some embodiments, the polynucleotide molecules target the translated region of the mRNA. According to some embodiments, the polynucleotide molecules target the untranslated region of the mRNA.

[0013] According to some embodiments, there is provided a composition comprising: (i) a polynucleotide molecule that comprises at least 18 contiguous nucleotides that are essentially identical or essentially complementary to a plant gene or a transcript of the plant gene; and (ii) a transfer agent that conditions a surface of a plant to permeation by the polynucleotide molecule into cells of the plant; wherein permeation of the polynucleotide molecule into cells of the plant causes a transient reduction in the expression of the gene and wherein the transient reduction in the expression of the gene causes a change in a yield-associated trait of the plant.

[0014] According to some embodiments, the yield-associated trait of the plant is selected from the group consisting of: increased grain/seed size, increased grain number, increased number of panicles/siliques, increased number of tillers, increased branching, increased seed size, increased seed filling, increased seed number, increased heading, improved drought resistance, decreased shattering, decreased abscise tissue formation, late-flowering, early-flowering, increased shattering, increased abscise tissue formation, decreased petals in the plant, increased protein content of the plant, increased carbohydrate content of the plant, increased oil content of the plant, improved oil composition of the plant, starch content, starch composition, carbohydrate content, carbohydrate composition and any combination thereof. Each possibility is a separate embodiment.

[0015] According to some embodiments, there is provided a composition suitable for topical application on plants, composition comprising a dsRNA molecule that comprises at least 18 contiguous nucleotides that are essentially identical or essentially complementary to a portion of a plant gene or a transcript of the plant gene; and a transfer agent configured to facilitate permeation of the dsRNA molecule into cells of the plant, wherein permeation of the dsRNA molecule into cells of the plant causes a transient reduction in the expression of the gene.

[0016] The transient reduction in the expression of the gene causes a change in a trait of the plant.

[0017] The trait of the plant selected from the group consisting of increased branching, increased grain filling, increased trehalose-6-phosphate (T6P) levels, increased number of panicles, increased seed filling, increased seed number, increased seed size, decreased shattering, decreased abscise tissue formation, increased number of tillers, increased heading in the plant, petal reduction, increase siliques size, late or early flowering, delayed senescence and any combination thereof; or selected from the group consisting of increased branching, increased grain filling, increased number of panicles, increased seed filling, increased seed number, increased seed size, decreased shattering, decreased abscise tissue formation, increased number of tillers, increased heading in the plant, petal reduction, increase siliques size and any combination thereof; or selected from the group consisting of increased branching, increased grain filling, increased number of panicles, increased seed filling, increased seed number, decreased shattering, decreased abscise tissue formation, increased number of tillers, petal reduction, increase siliques size and any combination thereof. Each possibility is a separate embodiment.

[0018] According to some embodiments, the plant gene is selected from ADPG1, PTL, CKX2, BRC1, KIN1, SKIN1, PIN5b, JAG1, BS1, PLDα1 and/or or any homolog or combination thereof. Each possibility is a separate embodiment. According to some embodiments, the plant gene is selected from the composition of claim 1, wherein the plant gene is selected from ADPG1, PTL, CKX2, BRC1 and/or or any homolog or combination thereof. Each possibility is a separate embodiment.

[0019] According to some embodiments, the plant is an oilseed rape plant, and the dsRNA molecule a dsRNA molecule including at least 18 contiguous nucleotides that are essentially identical or essentially complementary to a portion of a sequence encoding any of the amino acid sequences set forth in NO SEQ ID NO: 599, SEQ ID NO: 650, SEQ ID NO: 522 and SEQ ID NO: 365. Each possibility is a separate embodiment. According to some embodiments, the dsRNA molecule has at least 80% homology to any of the sequences set forth in SEQ ID NO: 729, SEQ ID NO: 733, SEQ ID NO: 731 and SEQ ID NO: 730. Each possibility is a separate embodiment. According to some embodiments, the dsRNA molecule has at least 90% homology to any of the sequences set forth in SEQ ID NO: 729, SEQ ID NO: 733, SEQ ID NO: 731 and SEQ ID NO: 730. Each possibility is a separate embodiment.

[0020] According to some embodiments, the plant is a soybean plant, and the dsRNA molecule a dsRNA molecule including at least 18 contiguous nucleotides that are essentially identical or essentially complementary to a portion of a sequence encoding any of the amino acid sequences set forth in SEQ ID NO: 379, SEQ ID NO: 603, SEQ ID NO: 655, SEQ ID NO: 564, SEQ ID NO: 517, SEQ ID NO: 480 and SEQ ID NO: 488. Each possibility is a separate embodiment.

[0021] According to some embodiments, the plant is a soybean plant, and the dsRNA molecule a dsRNA molecule including at least 18 contiguous nucleotides that are essentially identical or essentially complementary to a portion of a sequence encoding any of the amino acid sequences set forth in SEQ ID NO: 379, SEQ ID NO: 517, SEQ ID NO: 480 and SEQ ID NO: 488. Each possibility is a separate embodiment. According to some embodiments, the dsRNA molecule has at least 80% homology to any of the sequences set forth in SEQ ID NO: 734-741. Each possibility is a separate embodiment. According to some embodiments, the dsRNA molecule has at least 90% homology to any of the sequences set forth in SEQ ID NO: 734-741. Each possibility is a separate embodiment.

[0022] According to some embodiments, the plant is a rice plant, and the dsRNA molecule a dsRNA molecule including at least 18 contiguous nucleotides that are essentially identical or essentially complementary to a portion of a sequence encoding any of the amino acid sequences set forth in SEQ ID NO: 407, SEQ ID NO: 610, SEQ ID NO: 659, SEQ ID NO: 589, SEQ ID NO: 416 and SEQ ID NO: 450. Each possibility is a separate embodiment.

[0023] According to some embodiments, the plant is a rice plant, and the dsRNA molecule a dsRNA molecule including at least 18 contiguous nucleotides that are essentially identical or essentially complementary to a portion of a sequence encoding any of the amino acid sequences set forth in SEQ ID NO: 407, SEQ ID NO: 416 and SEQ ID NO: 450. Each possibility is a separate embodiment. According to some embodiments, the dsRNA molecule has at least 80% homology to any of the sequences set forth in SEQ ID NO: 742-747. Each possibility is a separate embodiment. According to some embodiments, the dsRNA molecule has at least 90% homology to any of the sequences set forth in SEQ ID NO: 742-747. Each possibility is a separate embodiment.

[0024] According to some embodiments, the dsRNA molecule is at least about 50, bases in length. According to some embodiments, the dsRNA molecule is at least about 200, bases in length.

[0025] According to some embodiments, the transfer agent comprises N, N-dimethyl Decanamide, coco amidopropyldimethyamine, Siloxane Polyalkyleneoxide Copolymer, AG-RHO® EM-30, Dimethylamide of C8/C10 fatty acid, esterified copolymer of glycerol, trisiloxane ethoxylate or any combination thereof. Each possibility is a separate embodiment.

[0026] According to some embodiments, the transfer agent may be any of the transfer agents set forth in TABLE 1.

[0027] According to some embodiments, there is provided a method for topically applying to a plant surface the composition as essentially disclosed herein.

[0028] According to some embodiments, the applying comprises spraying the composition onto the surface of a plant. According to some embodiments, the composition is sprayed onto the surface of a plant with a boom that extends over a crop, a boomless sprayer, an agricultural sprayer, a crop-dusting airplane, a pressurized backpack sprayer, a track sprayer, or a laboratory sprayer/submerger. Each possibility is a separate embodiment.

[0029] According to some embodiments, the applying comprises providing the composition through an irrigation system.

[0030] According to some embodiments, the plant surface is the surface of one or more plant part selected from the group consisting of hypocotyl, cotyledon, leaf, flower, stem, tassel, meristem, pollen, ovule, and fruit. Each possibility is a separate embodiment.

[0031] According to some embodiments, the method further includes timing the applying of the composition at a desired developmental stage of the plant, as essentially explained herein for example in TABLE 2.

[0032] Certain embodiments of the present disclosure may include some, all, or none of the above advantages. One or more technical advantages may be readily apparent to those skilled in the art from the figures, descriptions and claims included herein. Moreover, while specific advantages have been enumerated above, various embodiments may include all, some or none of the enumerated advantages.

[0033] In addition to the exemplary aspects and embodiments described above, further aspects and embodiments will become apparent by reference to the figures and by study of the following detailed descriptions.

### BRIEF DESCRIPTION OF THE FIGURES

[0034] The invention will now be described in relation to certain examples and embodiments with reference to the following illustrative figures so that it may be more fully understood.

[0035] FIG. 1 shows the contact angle (indicative of penetration) as a function of time after application of target agent mixture on a leaf of an oil seed rape plant;

[0036] FIG. 2 shows exemplary pictures of flower morphology of oilseed rape plants, here Brassica napus plants ectopically sprayed with 10 μg/ml of dsRNA set forth in SEQ ID NO: 733 targeting the sequence set forth in SEQ ID NO: 286. Control treated plants with normal petal morphology (left). BnPTL dsRNA treated plants causing flowers with changed petal morphology (right).

[0037] FIG. 3 shows exemplary pictures of oilseed rape plants, here Brassica napus plants ectopically sprayed with 10 μg/ml dsRNA set forth in SEQ ID NO: 730 targeting BnBRC1 and the sequence set forth in SEQ ID NO: 1 vs. control plants (Ctrl) plants. The total number of branches each group is depicted.

[0038] FIG. 4 shows average branch number per oilseed rape plants, here Brassica napus plants ectopically sprayed with 1 μg/ml or 10 μg/ml of dsRNA set forth in SEQ ID NO: 730 targeting the BnBRC1 sequence set forth in SEQ ID NO: 1 or plant sprayed with surfactant solution only. * indicates a significant change of treatment compared to the control plants (Ctrl) (P<0.1).

[0039] FIG. 5A shows the average seed weight per 0.8 m², of oilseed rape plants, here Brassica napus plants sprayed with dsRNA set forth in SEQ ID NO: 733 targeting the sequence set forth in SEQ ID NO: 286 obtained for the 1^{st} field. * indicates a significant change of treatment as compared to the control plants (Ctrl) (P<0.1).

[0040] FIG. 5B shows the average seed weight per 0.8 m², of oilseed rape plants, here Brassica napus plants sprayed with dsRNA set forth in SEQ ID NO: 733 targeting the sequence set forth in SEQ ID NO: 286 obtained for the 2^{nd} field. * indicates a significant change of treatment as compared to the control plants (Ctrl) (P<0.1).

[0041] FIG. 6A shows the average oil content percentage of oilseed rape plants, here Brassica napus plants sprayed with dsRNA set forth in SEQ ID NO: 733 targeting the sequence set forth in SEQ ID NO: 286 obtained for the 1^{st} field. * indicates a significant change of treatment as compared to the control plants (Ctrl) (P<0.1).

[0042] FIG. 6B shows the average oil content percentage of oilseed rape plants, here Brassica napus plants sprayed with dsRNA set forth in SEQ ID NO: 733 targeting the sequence set forth in SEQ ID NO: 286 obtained for the 2^{nd} field. * indicates a significant change of treatment as compared to the control plants (Ctrl) (P<0.1).

[0043] FIG. 7 shows average branch number per oilseed rape plants (Brassica napus) plants ectopically sprayed with 1 μg/ml or 10 μg/ml of dsRNA set forth in SEQ ID NO: 730 targeting the sequence set forth in SEQ ID NO: 1 or plant sprayed with surfactant solution only. * indicates a significant change of treatment compared to the control plants (Ctrl) (P<0.1).

[0044] FIG. 8A shows the average seed weight per 0.8 m², of oilseed rape plants (Brassica napus) plants sprayed with dsRNA set forth in SEQ ID NO: 731 targeting the sequence set forth in SEQ ID NO: 158 obtained for the 1^{st} field. * indicates a significant change of treatment as compared to the control plants (Ctrl) (P<0.1).

[0045] FIG. 8B shows the average seed weight per 0.8 m², of oilseed rape plants (Brassica napus) plants sprayed with dsRNA set forth in SEQ ID NO: 731 targeting the sequence set forth in SEQ ID NO: 158 obtained for the 2^{nd} field. * indicates a significant change of treatment as compared to the control plants (Ctrl) (P<0.1).

[0046] FIG. 9A shows the average seed weight per 0.8 m², of oilseed rape plants (Brassica napus) plants sprayed with dsRNA set forth in SEQ ID NO: 729 targeting the sequence set forth in SEQ ID NO: 235 obtained for the 1^{st} field. * indicates a significant change of treatment as compared to the control plants (Ctrl) (P<0.1).

[0047] FIG. 9B shows the average seed weight per 0.8 m², of oilseed rape plants (Brassica napus) plants sprayed with dsRNA set forth in SEQ ID NO: 729 targeting the sequence set forth in SEQ ID NO: 235 obtained for the 2^{nd} field. * indicates a significant change of treatment as compared to the control plants (Ctrl) (P<0.1).

[0048] FIG. 10A shows the average oil content percentage of oilseed rape plants (Brassica napus) plants sprayed with dsRNA set forth in SEQ ID NO: 729 targeting the sequence set forth in SEQ ID NO: 235 obtained for the 1^{st} field. * indicates a significant change of treatment as compared to the control plants (Ctrl) (P<0.1).

[0049] FIG. 10B shows the average oil content percentage of oilseed rape plants (Brassica napus) plants sprayed with dsRNA set forth in SEQ ID NO: 729 targeting the sequence set forth in SEQ ID NO: 235 obtained for the 2^{nd} field. * indicates a significant change of treatment as compared to the control plants (Ctrl) (P<0.1).

[0050] FIG. 11 shows the average number of tillers per rice plant (Oryza sativa) treated with 1 μg/ml or 10 μg/ml of dsRNA set forth in SEQ ID NO: 742 targeting the sequence set forth in SEQ ID NO: 43 or plant sprayed with surfactant solution only. * indicates a significant change of treatment compared to the control plants (Ctrl) (P<0.1).

[0051] FIG. 12 shows the average number of branches soybean plant (Glycine max) treated with 1 μg/ml or 10 μg/ml of −dsRNA set forth in SEQ ID NO: 734 targeting the sequence set forth in SEQ ID NO: 15 or plant sprayed with surfactant solution only. * indicates a significant change of treatment compared to the control plants (Ctrl) (P<0.1).

### DETAILED DESCRIPTION

[0052] In the following description, various aspects of the disclosure will be described. For the purpose of explanation, specific configurations and details are set forth in order to provide a thorough understanding of the different aspects of the disclosure. However, it will also be apparent to one skilled in the art that the disclosure may be practiced without specific details being presented herein. Furthermore, well-known features may be omitted or simplified in order not to obscure the disclosure.

[0053] The following definitions and methods are provided to better define the present invention and to guide those of ordinary skill in the art in the practice of the present invention. Unless otherwise noted, terms are to be understood according to conventional usage by those of ordinary skill in the relevant art.

[0054] Where a term is provided in the singular, the inventors also contemplate aspects of the invention described by the plural of that term.

[0055] As used herein, the terms “polynucleotide molecule” and “polynucleotide” may be used interchangeably and refer to any polynucleotide composed of 18 or more nucleotides covalently bonded in a chain and capable of hybridizing to DNA and RNA molecules under physiological conditions. According to some embodiments, the polynucleotide may be a synthetic and/or artificial polynucleotide molecule. According to some embodiments, the polynucleotide molecule is a biopolymer. According to some embodiments, the biopolymer is a DNA (deoxyribonucleic acid) or an RNA (ribonucleic acid) molecule.

[0056] According to some embodiments, the polynucleotide molecules target the mRNA of the plant gene. According to some embodiments, the polynucleotide molecules target the translated region of the mRNA. According to some embodiments, the polynucleotide molecules target the untranslated region (UTR) of the mRNA.

[0057] As used herein, the terms “DNA”, “DNA molecule” and “DNA polynucleotide molecule” refer to a single-stranded DNA or double-stranded DNA molecule of genomic or synthetic origin, such as, a polymer of deoxyribonucleotide bases or a DNA polynucleotide molecule.

[0058] As used herein, the terms “DNA sequence”, “DNA nucleotide sequence”, and “DNA polynucleotide sequence” refer to the nucleotide sequence of a DNA molecule.

[0059] As used herein, the term “gene” refers to any portion of a nucleic acid that provides for expression of a transcript or encodes a transcript. A “gene” thus includes, but is not limited to, a promoter region, 5′ untranslated regions, transcript encoding regions that can include intronic regions, and 3′ untranslated regions.

[0060] As used herein, the terms “RNA”, “RNA molecule”, and “RNA polynucleotide molecule” refer to a single-stranded RNA or double-stranded RNA molecule of genomic or synthetic origin, such as, a polymer of ribonucleotide bases that comprise single or double stranded regions or any other structural elements.

[0061] Unless otherwise stated, nucleotide sequences in the text of this specification are given, when read from left to right, in the 5′ to 3′ direction. The nomenclature used herein is that required by Title 37 of the United States Code of Federal Regulations § 1.822 and set forth in the tables in WIPO Standard ST.25 (1998), Appendix 2, Tables 1 and 3.

[0062] As used herein, a “plant surface” refers to any exterior portion of a plant. Plant surfaces thus include, but are not limited to, the surfaces of flowers, stems, tubers, fruit, anthers, pollen, leaves, roots, or seeds. A plant surface can be on a portion of a plant that is attached to other portions of a plant or on a portion of a plant that is detached from the plant.

[0063] As used herein, the phrase “polynucleotide is not operably linked to a promoter” refers to a polynucleotide that is not covalently linked to a polynucleotide promoter sequence that is specifically recognized by either a DNA dependent RNA polymerase II protein or by a viral RNA dependent RNA polymerase in such a manner that the polynucleotide will be transcribed by the DNA dependent RNA polymerase protein or viral RNA dependent RNA polymerase. A polynucleotide that is not operably linked to a promoter can be transcribed by a plant RNA dependent RNA polymerase.

[0064] As used herein, SEQ ID NO: 1-364 and 729-747, though displayed in the Sequence Listing in the form of ssDNA, encompass dsDNA equivalents, dsRNA equivalents, ssRNA equivalents, ssRNA complements, ssDNA as shown, and ssDNA complements.

[0065] As used herein, the term “transfer agent” may refer to any agent rendering the plant prone to receiving polynucleotides when the agent is applied to the surface of the plant. According to some embodiments, a transfer agent is an agent that conditions the surface of plant tissue, e.g., seeds, leaves, stems, roots, flowers, or fruits, to permeation by the polynucleotide molecules into plant cells. Chemical agents for conditioning or transfer include (a) wetting agents, (a) surfactants, (b) an organic solvent or an aqueous solution or aqueous mixtures of organic solvents, (c) oxidizing agents, (d) acids, (e) bases, (f) oils, (g) enzymes, or combinations thereof.

[0066] According to some embodiments the transfer agent may be selected from N, N-dimethyl Decanamide, coco amidopropyldimethyamine, Siloxane Polyalkyleneoxide Copolymer, AG-RHO® EM-30, Dimethylamide of C8/C10 fatty acid, esterified copolymer of glycerol, trisiloxane ethoxylate or any combination thereof.

[0067] A non-limiting example of a suitable transfer agent include organosilicone compounds.

[0068] As used herein, the phrase “organosilicone preparation” refers to a liquid comprising one or more organosilicone compounds, wherein the liquid or components contained therein, when combined with a polynucleotide in a composition that is topically applied to a target plant surface, better enables the polynucleotide to enter a plant cell. Exemplary organosilicone preparations include, but are not limited to, preparations marketed under the trade names Silwet® or BREAKTHRU®. In certain embodiments, an organosilicone preparation can better enable a polynucleotide to enter a plant cell in a manner permitting a polynucleotide mediated suppression of target gene expression in the plant cell.

[0069] A non-limiting example of a specific suitable transfer agent includes Silwet® L-77, which is a modified trisiloxane that combines a very low molecular weight trisiloxane with a polyether group. It is characterized by remarkable interfacial activity, which can result in dramatically reduced aqueous surface tension, outstanding spreading or levelling and stabilized foam. All of which may be achieved using a fraction of the typical concentration levels of organic or fluorocarbon surfactants.

[0070] Another non-limiting example of a specific suitable transfer agent includes GENAGEN™ 4166 (Clariant, Material no.: 10783626892). GENAGEN™ 4166 is a dimethylamide based on naturally derived fatty acids.

[0071] Another non-limiting example of a specific suitable transfer agent includes SYNERGEN® GL 5: (Clarian, Material no.: 20072326894). SYNERGEN® GL 5 is a polyglycerol ester-based adjuvant, which is a TAE-free surfactant derived from renewable resources. Another non-limiting example of a specific suitable transfer agent includes GENAGEN™ 4296 (Clariant, Material no.: 10783926892). GENAGEN™ 4296 is a dimethylamide based on naturally derived fatty acids.

[0072] Another non-limiting example of a specific suitable transfer agent includes SYNERGEN® GA: (Clariant, Material no.: 27251626894). SYNERGEN® GA is a novel biological enhancer of salts of agrochemicals, based on alkylglucamines. It is a sugar-based surfactant with a renewable carbon index (RCI) above 95% and therefore with an excellent ecological profile.

[0073] Another non-limiting example of a specific suitable transfer agent includes GENAGEN™ SC 35 (Clariant, Material no.: 25923226892). GENAGEN™ SC 35 is a basic surfactant blend of alkyl diglycol ether sulfate sodium salt and coconut fatty acid monoethanolamide.

[0074] Another non-limiting example of a specific suitable transfer agent includes HOSTAPHAT® 1306 (Clariant, Material no.: 13326826900). HOSTAPHAT® 1306 is an anionic emulsifier used for the emulsion polymerization of monomers like pure acrylic, styrene-acrylic acid esters and vinyl acetate.

[0075] Another non-limiting example of a specific suitable transfer agent includes SURFECO PLUS™ (Latro). SURFECO PLUS™ is silicone-based adjuvant used for the modify to physical properties and enhancing biological activities of agrochemicals.

[0076] Additional suitable transfer agents and their chemical properties are summarized in TABLE 1 below.

TABLE 1
Transfer agents

| Material | Chemistry | CAS | Manufacturer |
|---|---|---|---|
| Adsee ® C80W | cocoamidopropyl- | 68140-01-2 | Nouryon |
| | dimethyamine | | |
| AG-RHO ® | — | — | Solvay |
| EM-30 | | | |
| Silwet ® L-77 | Siloxane | 27306-78-1 & | Momentive |
| AG | Polyalkyleneoxide | 67674-67-3 | |
| | Copolymer | | |
| HALLCOMID ® | N,N-dimethyl | 14433-76-2 | Stepan |
| M-10 | Decanamide | | |
| GENAGEN ™ | Dimethylamide | 10783626892 | Clariant |
| 4166 | of C8/C10 fatty acid | | |
| SYNERGEN ® | Copolymer of | 20072326894 | Clariant |
| GL5 | glycerol, esterified | | |
| SURFECO | trisiloxane | | Latro |
| PLUS ™ | ethoxylate | | |
| BREAK- | — | — | Evonik |
| THRU ® S301 | | | |
| BREAK- | — | — | Evonik |
| THRU ® S278 | | | |
| BREAK- | — | — | Evonik |
| THRU ® S233 | | | |
| TEGOPREN ® | — | — | Evonik |
| 5873 | | | |

[0077] As used herein, the phrases “improved yield” refers to any measurable improvement in yield. In certain embodiments, an improvement in yield in a plant or plant part can be determined in a comparison to a control plant or plant part that has not been treated with a composition comprising a polynucleotide. When used in this context, a control plant is a plant that has not undergone treatment with polynucleotide and a transfer agent. Such control plants would include, but are not limited to, untreated plants or mock treated plants.

[0078] Non-limiting examples of traits affected by the herein disclosed compositions include: increased branching, increased seed filing, increased seed number, improved drought resistance, decreased shattering, decreased abscise tissue formation, late/early flowering and any combination thereof. Each possibility is a separate embodiment.

[0079] Non-limiting examples of rice plant traits affected by the herein disclosed compositions include: increased grain size, increased number of panicles, increased number of tillers, increased heading and any combination thereof. Each possibility is a separate embodiment.

[0080] Non-limiting examples of oilseed rape traits affected by the herein disclosed compositions include: increased grain size, increased number of panicles, increased number of tillers, increased branching, increased seed filling increased seed number, increased heading, improved drought resistance, decreased shattering, decreased abscise tissue formation, late/early flowering, shorten/prolonged flowering period and any combination thereof. Each possibility is a separate embodiment.

[0081] According to some embodiments, the plant may be any cultivated plant, such as, but not limited to, oilseed rape, rapeseed, rice, wheat, barley, soy, peanut, cotton, corn, sorghum, sugarcane, sugar beet, beans, sunflower potato, sweet potato, alfalfa, banana, apricot, grape, apple, peach, prune, citrus, date, palm oil, pepper, tomato, broccoli, onion, melon, watermelon, yam, cassava. Each possibility is a separate embodiment.

[0082] According to some embodiments, the plant may be a soy plant, a rice plant or an oilseed rape plant. Each possibility is separate embodiment. According to some embodiments, the soybean plant may be of the species Glycine max. According to some embodiments, the rice plant may be of the species Oryza sativa. According to some embodiments, the oilseed rape plant may be of the species Brassica napus. Each possibility is separate embodiment.

[0083] According to some embodiments, the gene targeted by the polynucleotide molecule may be referred to by a scientific name as used in one species, e.g. in Arabidopsis thaliana. However, it is understood to one of ordinary skill in the art that aliases as well as homologs of another species referred to by another name (alias/homolog) are encompassed within the stated scientific name. As a non-liming example, when the gene targeted by the polynucleotide molecule is referred to as BRC1, it encompasses the aliases/homologs TB1/FC1.

[0084] According to some embodiments, the target gene may have a nucleotide sequence selected from any of the nucleotide sequences set forth in SEQ ID NO: 1-364. Each possibility is a separate embodiment. According to some embodiments, the target gene may encode an amino acid sequence selected from any of the amino acid sequences set forth in SEQ ID NO: 365-728. Each possibility is a separate embodiment. According to some embodiments, the polynucleotide (i.e. the dsRNA) may have the nucleotide sequence set forth in SEQ ID NO: 729-747. Each possibility is a separate embodiment.

[0085] According to some embodiments, the polynucleotide molecule is dsRNA having a polynucleotide sequence essentially identical to the sequence set forth in any one of SEQ ID NO: 729-747 or major part thereof. As used herein, the term “major part thereof” with referral to the dsRNA refers the dsRNA being at least 80% identical to at least 18-20 contiguous base pairs of the sequence set forth in any one of SEQ ID NO: 729-747, the dsRNA being at least 85% identical to at least 18-20 contiguous base pairs of the sequence set forth in any one of SEQ ID NO: 729-747, the dsRNA being at least 90% identical to at least 18-20 contiguous base pairs of the sequence set forth in any one of SEQ ID NO: 729-747, the dsRNA being at least 95% identical to at least 18-20 contiguous base pairs of the sequence set forth in any one of SEQ ID NO: 729-747, or the dsRNA being at least 98% identical to at least 18-20 contiguous base pairs of the sequence set forth in any one of SEQ ID NO: 729-747. Each possibility is a separate embodiment.

[0086] As used herein, the term “essentially identical to” with referral to the dsRNA refers to a dsRNA sequence having at least 80%, at least 90%, at least 95% homology, or at least 98% homology to a portion of the nucleotide sequence set forth in SEQ ID NO: 1-364. As used herein, the term “a portion of the nucleotide sequence set forth” refers to a portion of the nucleotide sequence target by the dsRNA having an essentially same length as the dsRNA. As a non-limiting example, if the dsRNA has a length of 18 bp, the portion of the nucleotide sequence targeted by the dsRNA has a length of about 18 bp. As another non-limiting example, if the dsRNA has a length of 200 bp, the portion of the nucleotide sequence targeted by the dsRNA has a length of about 200 bp.

[0087] As used herein, the terms “approximately” and “about” refer to +/−10%, or +/−5%, or +−2% vis-à-vis the range to which it refers. Each possibility is a separate embodiment.

[0088] According to some embodiments, the dsRNA targets BnADPG1 of oilseed rape plants (SEQ ID NO: 235) and has the polynucleotide sequence set forth in SEQ ID NO: 729.

[0089] According to some embodiments, the dsRNA targets BnBRC1 of oilseed rape plants (SEQ ID NO: 1) and has the polynucleotide sequence set forth in SEQ ID NO: 730.

[0090] According to some embodiments, the dsRNA targets BnCKX2 of oilseed rape plants (SEQ ID NO:158) and has the polynucleotide sequence set forth in SEQ ID NO: 731.

[0091] According to some embodiments, the dsRNA targets BnKIN10 of oilseed rape plants (SEQ ID NO: 62) and has the polynucleotide sequence set forth in SEQ ID NO: 732.

[0092] According to some embodiments, the dsRNA targets BnPTL of oilseed rape plants (SEQ ID NO: 286) and has the polynucleotide sequence set forth in SEQ ID NO: 733.

[0093] According to some embodiments, the dsRNA targets GmBRC1 of the soybean plant (SEQ ID NO: 15) and has the polynucleotide sequence set forth in SEQ ID NO: 734 or 735.

[0094] According to some embodiments, the dsRNA targets GmBS1 of the soybean plant (SEQ ID NO: 116) and has the polynucleotide sequence set forth in SEQ ID NO: 736 or 737.

[0095] According to some embodiments, the dsRNA targets GmJAG1 of the soybean plant (SEQ ID NO: 153) and has the polynucleotide sequence set forth in SEQ ID NO: 738 or 739.

[0096] According to some embodiments, the dsRNA targets GmPLDa1 of the soybean plant (SEQ ID NO: 124) and has the polynucleotide sequence set forth in SEQ ID NO: 740 or 741.

[0097] According to some embodiments, the dsRNA targets OsBRC1 of the rice plant (SEQ ID NO: 43) and has the polynucleotide sequence set forth in SEQ ID NO: 742 or 743.

[0098] According to some embodiments, the dsRNA targets OsPIN5b of the rice plant (SEQ ID NO: 86) and has the polynucleotide sequence set forth in SEQ ID NO: 744 or 745.

[0099] According to some embodiments, the dsRNA targets OsSKIN1 of the rice plant (SEQ ID NO: 52) and has the polynucleotide sequence set forth in SEQ ID NO: 746 or 747.

[0100] According to some embodiments, the composition and method for applying same may include the timing of the applying of the composition to a desired developmental trait of the plant. As a non-limiting example, the applying of a composition comprising a polynucleotide configured to target the gene BS1 (or other gene involved in the regulation of seed filling) may be timed to when the plant is at seed filling stage (R3-R5 dev. stage). As another non-limiting example, the applying of a composition comprising a polynucleotide configured to target the gene BRC1 (or other gene the reduced expression of which causing increased branching or number of tillers) may be timed to the bolting stage (R1-R2 dev. stage) in soy plants or to the vegetative phase in the development of axillary buds in rice plants. As another non-limiting example, the applying of a composition comprising a polynucleotide configured to target the gene JAG1 (or other gene increases the number of seeds) may be timed to when the plant is at flowering stage (R1-R2 dev. stage). As another non-limiting example, the applying of a composition comprising a polynucleotide configured to target the gene SGR1 (or other target gene the reduction of which increased resistance to drought) may be timed to a period of unexpected drought. As another non-limiting example, the applying of a composition comprising a polynucleotide configured to target the gene AGL1 (or other target gene the reduction of which causes reduced shattering) may be timed to when the siliques of the plant mature. As another non-limiting example, the applying of a composition comprising a polynucleotide configured to target the gene FT5a (or other target gene the reduction of which is involved in the regulation of flowering) may be timed to when the plant is at the flowering stage. As another non-limiting example, the applying of a composition comprising a polynucleotide configured to target the gene GNI1 (or other gene that regulates grain size) may be timed to when plant is at seed filling stage.

[0101] According to some embodiments, the composition may include more than one polynucleotide sequence (different sequences), such as 2, 3, 4, 5 or more polynucleotide sequences. Each possibility is a separate embodiment.

[0102] According to some embodiments, the two or more polynucleotide sequences may target the same target gene. i.e. they may be directed to different part of the sequence of the same target gene.

[0103] According to some embodiments, the two or more polynucleotide sequences may target different target genes.

[0104] According to some embodiments, the different target genes may be directed to a same yield associated trait (e.g., decreased shattering). As a non-limiting example, the two or more polynucleotide sequences may target AGL1 and PDH1. As another non-limiting example, the two or more polynucleotide sequences may target two or more of JAG1, JAG2, CKX1, OTU1 all affecting seed number.

[0105] According to some embodiments, the different target genes may be directed to different yield associated traits (e.g., increased drought resistance and seed filling). As a non-limiting example, a first of the two or more polynucleotide sequences may target ERA1, SGR1, SGR2, ACO2, CER9 or CytG, whereas a second of the two or more polynucleotide sequences may target BS1, PLD, ACO3 or PDHK.

[0106] As used herein, the phrase “reduction in the expression”, when used in the context of a transcript or a protein in a plant or plant part, refers to any measurable decrease in the level of transcript or protein in a plant or plant part. In certain embodiments, a reduction of the level of a transcript or protein in a plant or plant part can be determined in a comparison to a control plant or plant part that has not been treated with a composition comprising a polynucleotide and a transfer agent.

[0107] As used herein, the phrase “wherein said plant does not comprise a transgene” refers to a plant that lacks either a DNA molecule comprising a promoter that is operably linked to a polynucleotide or a recombinant viral vector.

[0108] As used herein, the term “transgene” describes a segment of DNA containing a gene sequence isolated from one organism and is introduced into the DNA of a different organism.

[0109] As used herein, the phrase “suppressing expression” or “reducing expression”, when used in the context of a gene, refers to any measurable decrease in the amount and/or activity of a product encoded by the gene. Thus, expression of a gene can be suppressed when there is a reduction in levels of a transcript from the gene, a reduction in levels of a protein encoded by the gene, a reduction in the activity of the transcript from the gene, a reduction in the activity of a protein encoded by the gene, any one of the preceding conditions, or any combination of the preceding conditions. In this context, the activity of a transcript includes, but is not limited to, its ability to be translated into a protein and/or to exert any RNA-mediated biologic or biochemical effect. In this context, the activity of a protein includes, but is not limited to, its ability to exert any protein-mediated biologic or biochemical effect. When used in this context, a control plant or plant part is a plant or plant part that has not undergone treatment with polynucleotide and a transfer agent.

[0110] As used herein, the term “transient” when used in the context of a reduction/suppression in the expression of a gene, refers to a time-limited reduction in the expression of the gene that last only as long as the polynucleotide permeated into the cell is not degraded, as opposed to long-term expression typically referred to as “table expression”.

[0111] As used herein, the term “transcript” corresponds to any RNA that is produced from a gene by the process of transcription. A transcript of a gene can thus comprise a primary transcription product which can contain introns or can comprise a mature RNA that lacks introns.

[0112] As used herein, the term “homolog”, with reference to polynucleotide molecule, refers to a degree of sequence identity or similarity (homology) between nucleotide sequences indicative of shared ancestry. Two segments of DNA can have shared ancestry because of either a speciation event (orthologs) or a duplication event (paralogs). According to some embodiments a homolog may refer to a polynucleotide having substantially from about 70% to about 99% sequence identity, or more preferably from about 80% to about 99% sequence identity, or most preferable from about 90% to about 99% sequence identity, to about 99% sequence identity, to the referent nucleotide sequences of a referent polynucleotide molecule. Each possibility is a separate embodiment.

[0113] As used herein, the term “sequence identity”, “sequence similarity” or “homology” is used to describe sequence relationships between two or more nucleotide sequences. The percentage of “sequence identity” between two sequences is determined by comparing two optimally aligned sequences. A sequence that is identical at every position in comparison to a reference sequence is said to be identical to the reference sequence and vice-versa. A first nucleotide sequence when observed in the 5′ to 3′ direction is said to be a “complement” of, or complementary to, a second or reference nucleotide sequence observed in the 3′ to 5′ direction if the first nucleotide sequence exhibits complete complementarity with the second or reference sequence. As used herein, nucleic acid sequence molecules are said to exhibit “complete complementarity” when every nucleotide of one of the sequences read 5′ to 3′ is complementary to every nucleotide of the other sequence when read 3′ to 5′. A nucleotide sequence that is complementary to a reference nucleotide sequence will exhibit a sequence identical to the reverse complement sequence of the reference nucleotide sequence. These terms and descriptions are well defined in the art and are easily understood by those of ordinary skill in the art.

[0114] According to some embodiments, the composition may further include a carrier. According to some embodiments the carrier may be a liquid.

[0115] As used herein, the term “liquid” refers to both homogeneous mixtures such as solutions and non-homogeneous mixtures such as suspensions, colloids, micelles, and emulsions. Each possibility is a separate embodiment.

[0116] According to some embodiments, the liquid may be an aqueous solution. According to some embodiments, the liquid may be an oil or an oil mixture.

[0117] According to some embodiments, the polynucleotide may be naked. As used herein the term “naked” refers to the polynucleotide being non-encapsulated. The naked polynucleotide may however be modified and/or conjugated.

[0118] According to other embodiments, the polynucleotide may be encapsulated.

[0119] According to some embodiments, the polynucleotide may be delivered via and/or enclosed in a vehicle such as but not limited to a nanoparticle, a liposome, a micelle or the like.

[0120] Provided herein are certain methods and polynucleotide compositions that can be applied to living plant cells/tissues to suppress expression of target genes and that provide improved yield to a plant in need of the benefit. Also provided herein are plants and plant parts exhibiting improved yield as well as processed products of such plants or plant parts. The compositions may be topically applied to the surface of a plant, such as to the surface of a leaf. The composition can be applied to various plants including, but not limited to plants of the Brassicaceae family, the Fabaceae family or the Poaceae family of plants, such as but not limited to soybean plants, rice plants, oilseed rape plants and/or rapeseed plants. Each possibility is a separate embodiment.

[0121] As used herein, “polynucleotide” refers to a DNA or RNA molecule containing multiple nucleotides and generally refers both to “oligonucleotides” (a polynucleotide molecule of 18-25 nucleotides in length) and longer polynucleotides of 26 or more nucleotides. Embodiments of this invention include compositions including polynucleotides having a length of 18-25 nucleotides (18-mers, 19-mers, 20-mers, 21-mers, 22-mers, 23-mers, 24-mers, or 25-mers), or medium-length polynucleotides having a length of 26 or more nucleotides (polynucleotides of 26, 27, 28, 29, 30, 31, 32, 33, 34, 35, 36, 37, 38, 39, 40, 41, 42, 43, 44, 45, 46, 47, 48, 49, 50, 51, 52, 53, 54, 55, 56, 57, 58, 59, 60, about 65, about 70, about 75, about 80, about 85, about 90, about 95, about 100, about 110, about 120, about 130, about 140, about 150, about 160, about 170, about 180, about 190, about 200, about 210, about 220, about 230, about 240, about 250, about 260, about 270, about 280, about 290, or about 300 nucleotides), or long polynucleotides having a length greater than about 300 nucleotides (e. g., polynucleotides of between about 300 to about 400 nucleotides, between about 400 to about 500 nucleotides, between about 500 to about 600 nucleotides, between about 600 to about 700 nucleotides, between about 700 to about 800 nucleotides, between about 800 to about 900 nucleotides, between about 900 to about 1000 nucleotides, between about 300 to about 500 nucleotides, between about 300 to about 600 nucleotides, between about 300 to about 700 nucleotides, between about 300 to about 800 nucleotides, between about 300 to about 900 nucleotides, or about 1000 nucleotides in length, or even greater than about 1000 nucleotides in length, for example up to the entire length of a target gene including coding or non-coding or both coding and non-coding portions of the target gene). Where a polynucleotide is double-stranded, its length can be similarly described in terms of base pairs.

[0122] Polynucleotide compositions used in the various embodiments of this invention include compositions including polynucleotides, including: RNA or DNA or RNA/DNA hybrids or chemically modified polynucleotides or artificial polynucleotides or a mixture thereof. In certain embodiments, the polynucleotide may be a combination of ribonucleotides and deoxyribonucleotides, for example, synthetic polynucleotides consisting mainly of ribonucleotides but with one or more terminal deoxyribonucleotides or synthetic polynucleotides consisting mainly of deoxyribonucleotides but with one or more terminal dideoxyribonucleotides. In certain embodiments, the polynucleotide includes non-canonical nucleotides such as inosine, thiouridine, or pseudouridine. In certain embodiments, the polynucleotide includes chemically modified nucleotides. Examples of chemically modified oligonucleotides or polynucleotides are well known in the art. Illustrative examples include, but are not limited to, the naturally occurring phosphodiester backbone of an polynucleotide which can be partially or completely modified with phosphorothioate, phosphorodithioate, or methylphosphonate internucleotide linkage modifications, modified nucleoside bases or modified sugars can be used in polynucleotide synthesis, and polynucleotides can be labeled with a fluorescent moiety (e. g., fluorescein or rhodamine) or other label (e. g., biotin).

[0123] According to some embodiments, the dsRNA may be chemically modified on one or both strands to improve stability, expand the half-life of the dsRNA in-vivo, increase the bio-distribution and pharmacokinetic properties of the dsRNA, target the dsRNA to specific cells, increase the target binding affinity, and/or improve drug delivery. As a non-limiting example, the dsRNA may be modified to include methyl-groups to the 2′ position of the ribosyl ring of the 2nd base of the dsRNA. As another non-limiting example, the dsRNA may be modified to include a 3′ overhang.

[0124] According to some embodiments, the modifications can be included in the dsRNA. According to some embodiments, the modification does not prevent the dsRNA composition from serving as a substrate for Dicer. In one embodiment, one or more modifications are made that enhance Dicer processing of the dsRNA. In a second embodiment, one or more modifications are made that result in more effective RNAi generation. In a third embodiment, one or more modifications are made that support a greater RNAi effect. In a fourth embodiment, one or more modifications are made that result in greater potency per each dsRNA molecule to be delivered to the cell. Modifications can be incorporated in the 3′-terminal region, the 5′-terminal region, in both the 3′-terminal and 5′-terminal region or in some instances in various positions within the sequence. With the restrictions noted above in mind, any number and combination of modifications can be incorporated into the dsRNA. Where multiple modifications are present, they may be the same or different. Modifications to bases, sugar moieties, the phosphate backbone, and their combinations are contemplated. Either 5′-terminus can be phosphorylated.

[0125] Examples of modifications contemplated for the phosphate backbone include phosphonates, including methylphosphonate, phosphorothioate, and phosphotriester modifications such as alkylphosphotriesters, and the like. Examples of modifications contemplated for the sugar moiety include 2′-alkyl pyrimidine, such as 2′-O-methyl, 2′-fluoro, amino, and deoxy modifications and the like (see, e.g., Amarzguioui et al., 2003). Examples of modifications contemplated for the base groups include abasic sugars, 2-O-alkyl modified pyrimidines, 4-thiouracil, 5-bromouracil, 5-iodouracil, and 5-(3-aminoallyl)-uracil and the like. Locked nucleic acids, or LNA's, could also be incorporated. Many other modifications are known and can be used so long as the above criteria are satisfied.

[0126] Polynucleotides can be single- or double-stranded RNA, single- or double-stranded RNA, with structural features, single- or double-stranded DNA, double-stranded DNA/RNA hybrids, and modified analogues thereof. In certain embodiments of the invention, the polynucleotides that provide single-stranded RNA in the plant cell may be: (a) a single-stranded RNA molecule (ssRNA), (b) a single-stranded RNA molecule that self-hybridizes to form a double-stranded RNA molecule, (c) a double-stranded RNA molecule (dsRNA), (d) a single-stranded DNA molecule (ssDNA), (e) a single-stranded DNA molecule that self-hybridizes to form a double-stranded DNA molecule, (f) a single-stranded DNA molecule including a modified Pol III gene that is transcribed to an RNA molecule, (g) a double-stranded DNA molecule (dsDNA), (h) a double-stranded DNA molecule including a modified Pol III gene that is transcribed to an RNA molecule, (i) a double-stranded, hybridized RNA/DNA molecule, and (j) single-stranded RNA molecule (ssRNA) that self-hybridizes to form a structural motifs (such as stem-loop) or combinations thereof. In certain embodiments, these polynucleotides can comprise both ribonucleic acid residues and deoxyribonucleic acid residues. In certain embodiments, these polynucleotides include chemically modified nucleotides or non-canonical nucleotides. In certain embodiments of the methods, the polynucleotides include double-stranded DNA formed by intramolecular hybridization, double-stranded DNA formed by intermolecular hybridization, double-stranded RNA formed by intramolecular hybridization, or double-stranded RNA formed by intermolecular hybridization. In certain embodiments where the polynucleotide is a dsRNA, the anti-sense strand will comprise at least 18 nucleotides that are essentially complementary to the target gene. In certain embodiments the polynucleotides include single-stranded DNA or single-stranded RNA that self-hybridizes to form a hairpin structure having an at least partially double-stranded structure including at least one segment that will hybridize to RNA transcribed from the gene targeted for suppression. Not intending to be bound by any mechanism, it is believed that such polynucleotides are or will produce single-stranded RNA with at least one segment that will hybridize to RNA transcribed from the gene targeted for suppression.

[0127] The polynucleotide molecules of the present invention are designed to modulate expression by inducing regulation or suppression of an endogenous target gene in a plant and are designed to have a nucleotide sequence essentially identical or essentially complementary to the nucleotide sequence of an endogenous target gene of a plant or to the sequence of RNA transcribed from an endogenous target gene of a plant, which can be coding sequence or non-coding sequence.

[0128] By “essentially identical” or “essentially complementary” it is meant that the polynucleotides (or at least one strand of a double-stranded polynucleotide) have sufficient identity or complementarity to the endogenous gene or to the RNA transcribed from the endogenous target gene (e.g., the transcript) to suppress expression of the endogenous target gene (e.g. to effect a reduction in levels or activity of the gene transcript and/or encoded protein.

[0129] Polynucleotides of the methods and compositions provided herein need not have 100 percent identity to a complementarity to the endogenous target gene or to the RNA transcribed from the endogenous target gene (i.e. the transcript) to suppress expression of the endogenous target gene (i.e. to effect a reduction in levels or activity of the gene transcript or encoded protein). Thus, in certain embodiments, the polynucleotide or a portion thereof is designed to be essentially identical to, or essentially complementary to, a sequence of at least 18 or 19 contiguous nucleotides in either the target gene or messenger RNA transcribed from the target gene (e.g., the transcript). In certain embodiments, an “essentially identical” polynucleotide has 100 percent sequence identity or at least about 83, 84, 85, 86, 87, 88, 89, 90, 91, 92, 93, 94, 95, 96, 97, 98, or 99 percent sequence identity when compared to the sequence of 18 or more contiguous nucleotides in either the endogenous target gene or to an RNA transcribed from the target gene (e.g., the transcript). In certain embodiments, an “essentially complementary” polynucleotide has 100 percent sequence complementarity or at least about 83, 84, 85, 86, 87, 88, 89, 90, 91, 92, 93, 94, 95, 96, 97, 98, or 99 percent sequence complementarity when compared to the sequence of 18 or more contiguous nucleotides in either the target gene or RNA transcribed from the target gene.

[0130] In certain embodiments, polynucleotides used in the methods and compositions provided herein can be essentially identical or essentially complementary to any of: i) conserved regions of target genes of both monocot and dicot plants; ii) conserved regions of target genes of monocot plants; or iii) conserved regions of target genes of dicot plants. Such polynucleotides that are essentially identical or essentially complementary to such conserved regions can be used to improve delayed senescence and/or improved yield by suppressing expression of target genes in various dicot.

[0131] Polynucleotides containing mismatches to the target gene or transcript can thus be used in certain embodiments of the compositions and methods provided herein. In certain embodiments, a polynucleotide of 19 continuous nucleotides that is essentially identical or essentially complementary to the endogenous target gene or to an RNA transcribed from the target gene (e.g., the transcript) can have 1 or 2 mismatches to the target gene or transcript. In certain embodiments, a polynucleotide of 20 or more nucleotides that contains a contiguous 19 nucleotide span of identity or complementarity to the endogenous target gene or to an RNA transcribed from the target gene can have 1 or 2 mismatches to the target gene or transcript. In certain embodiments, a polynucleotide of 21 continuous nucleotides that is essentially identical or essentially complementary to the endogenous target gene or to an RNA transcribed from the target gene (e.g., the transcript) can have 1, 2, or 3 mismatches to the target gene or transcript. In certain embodiments, a polynucleotide of 22 or more nucleotides that contains a contiguous 21 nucleotide span of identity or complementarity to the endogenous target gene or to an RNA transcribed from the target gene can have 1, 2, or 3 mismatches to the target gene or transcript. In designing polynucleotides with mismatches to an endogenous target gene or to an RNA transcribed from the target gene, mismatches of certain types and at certain positions that are more likely to be tolerated can be used.

[0132] According to some embodiments, the target genes may be any of the target genes set forth in SEQ ID NO: 1-364) as well as orthologous target genes obtainable from other crops.

[0133] According to some embodiments, the plant may be an oilseed rape plant and the polynucleotide may reduce the level of a target gene having any of the nucleotide sequences set forth in SEQ ID NO: 1-14, 49-51, 62-66, 79-84, 104-115, 149-151, 158-199, 235-238, 252-258, 275-279, 286-290, 299-303, 311-318, 332-341 and 360-361 or major parts thereof. Each possibility is a separate embodiment.

[0134] According to some embodiments, the plant may be an oilseed rape plant and the polynucleotide may reduce the level of the protein having any of the amino acid sequences set forth in SEQ ID NO: 365-378, 413-415, 426-430, 443-448, 468-479, 513-515, 522-563, 599-602, 616-622, 639-643, 650-654, 663-667, 675-682, 696-705 and 724-725 or major parts thereof. Each possibility is a separate embodiment.

[0135] According to some embodiments, the plant may be an oilseed rape plant and the polynucleotide may reduce the level of the protein having any of the amino acid sequences set forth in SEQ ID NO: 1, 2, 9, 49, 62, 79, 80, 104, 149, 150, 158, 235, 252, 275, 276, 286, 299, 311, 332, 333 and 360 or major parts thereof. Each possibility is a separate embodiment.

[0136] According to some embodiments, the plant may be an oilseed rape plant and the polynucleotide may reduce the level of the protein having any of the amino acid sequences set forth in SEQ ID NO: 1, 2, 9, 49, 62, 79, 80, 104, 149, 150, 158, 235, 252 or major parts thereof. Each possibility is a separate embodiment.

[0137] According to some embodiments, the plant may be an oilseed rape plant and the polynucleotide may have the nucleotide sequence set forth in SEQ ID NO: 729-733.

[0138] According to some embodiments, the plant may be a soybean plant and the polynucleotide may reduce the level of a target gene having any of the nucleotide sequences set forth in SEQ ID NO: 15-42, 67-72, 116-148, 152-157, 200-224, 239-245, 291-294, 304-310, 319-325, 342-351 and 362 or any major part thereof. Each possibility is a separate embodiment.

[0139] According to some embodiments, the plant may be a soybean plant and the polynucleotide may reduce the level of a target gene having any of the nucleotide sequences set forth in SEQ ID NO: 15, 16, 22-31, 67-69, 116-124, 152-155, 200-204, 239, 240, 291-293, 304, 305, 319, 320, 342, 343, 345 and 362 or any major part thereof. Each possibility is a separate embodiment.

[0140] According to some embodiments, the plant may be a soybean plant and the polynucleotide may reduce the level of a target gene having any of the nucleotide sequences set forth in SEQ ID NO: 15, 16, 67-69, 116-124, 152-155, 200-204, 239, 240 or any major part thereof. Each possibility is a separate embodiment.

[0141] According to some embodiments, the plant may be a soybean plant and the polynucleotide may reduce the level of the protein having any of the amino acid sequences set forth in SEQ ID NO: 379-406, 431-436, 480-512, 516-521, 564-588, 603-609, 655-658, 668-674, 683-689, 706-715 and 726 or any major part thereof. Each possibility is a separate embodiment.

[0142] According to some embodiments, the plant may be a soybean plant and the polynucleotide may have the nucleotide sequences set forth in SEQ ID NO: 734-741.

[0143] According to some embodiments, the plant may be a rice plant and the polynucleotide may reduce the level of a target gene having any of the nucleotide sequences set forth in SEQ ID NO: 43-48, 52-61, 73-78, 85-103, 225-234, 246-251, 259-274, 280-285, 295-298, 326-331, 352-359, 363-364 or any major part thereof. Each possibility is a separate embodiment.

[0144] According to some embodiments, the plant may be a rice plant and the polynucleotide may reduce the level of a target gene having any of the nucleotide sequences set forth in SEQ ID NO: 43, 44, 52-57, 73-75, 85, 86, 225-227, 246-248, 259-264, 280, 281, 295-297, 326, 352, 353 and 363 or any major part thereof. Each possibility is a separate embodiment.

[0145] According to some embodiments, the plant may be a rice plant and the polynucleotide may reduce the level of a target gene having any of the nucleotide sequences set forth in SEQ ID NO: 43, 44, 52-57, 73-75, 85, 86, 225-227, 246-248, 259-264 or any major part thereof. Each possibility is a separate embodiment.

[0146] According to some embodiments, the plant may be a rice plant and the polynucleotide may reduce the level of the protein having any of the amino acid sequences set forth in SEQ ID NO: 407-412, 416-425, 437-442, 449-467, 589-598, 610-615, 623-638, 644-649, 659-662, 690-695, 716-723, 727 and 728 or any major part thereof. Each possibility is a separate embodiment.

[0147] According to some embodiments, the plant may be a rice plant and the polynucleotide (i.e., the dsRNA) may have the nucleotide sequences set forth in SEQ ID NO: 742-747.

[0148] In certain embodiments, polynucleotide compositions and methods provided herein typically effect regulation or modulation (e. g., suppression) of gene expression during a period of the life of the treated plant of several days to several weeks or longer and typically in systemic fashion. For instance, within days of treating a plant leaf with a polynucleotide composition of this invention, primary and transitive siRNAs can be detected in other leaves lateral to and above the treated leaf and in apical tissue. In certain embodiments, methods of systemically suppressing expression of a gene in a plant, the methods comprising treating said plant with a composition comprising at least one polynucleotide and a transfer agent, wherein said polynucleotide comprises at least 18 or at least 19 contiguous nucleotides that are essentially identical or essentially complementary to a gene or a transcript encoding a target gene of the plant are provided, whereby expression of the gene in said plant or progeny thereof is systemically suppressed in comparison to a control plant that has not been treated with the composition.

[0149] Compositions used to suppress a target gene can comprise one or more polynucleotides that are essentially identical or essentially complementary to multiple genes, or to multiple segments of one or more genes. In certain embodiments, compositions used to suppress a target gene can comprise one or more polynucleotides that are essentially identical or essentially complementary to multiple consecutive segments of a target gene, multiple non-consecutive segments of a target gene, multiple alleles of a target gene, or multiple target genes from one or more species.

[0150] In certain embodiments, the polynucleotide includes two or more copies of a nucleotide sequence (of 18 or more nucleotides) where the copies are arranged in tandem fashion. In another embodiment, the polynucleotide includes two or more copies of a nucleotide sequence (of 18 or more nucleotides) where the copies are arranged in inverted repeat fashion (forming an at least partially self-complementary strand). The polynucleotide can include both tandem and inverted-repeat copies. Whether arranged in tandem or inverted repeat fashion, each copy can be directly contiguous to the next, or pairs of copies can be separated by an optional spacer of one or more nucleotides. The optional spacer can be unrelated sequence.

[0151] While there is no upper limit on the concentrations and dosages of polynucleotide molecules that can be useful in the methods and compositions provided herein, lower effective concentrations and dosages will generally be sought for efficiency. The concentrations can be adjusted in consideration of the volume of spray or treatment applied to plant leaves or other plant part surfaces, such as flower petals, stems, tubers, fruit, anthers, pollen, leaves, roots, or seeds.

[0152] Embodiments of agents or treatments for conditioning of a plant to permeation by polynucleotides include emulsions, reverse emulsions, liposomes, and other micellar-like compositions. Embodiments of agents or treatments for conditioning of a plant to permeation by polynucleotides include counter-ions or other molecules that are known to associate with nucleic acid molecules, e. g., inorganic ammonium ions, alkyl ammonium ions, lithium ions, polyamines such as spermine, spermidine, or putrescine, and other cations. Organic solvents useful in conditioning a plant to permeation by polynucleotides include DMSO, DMF, pyridine, N-pyrrolidine, hexamethylphosphoramide, acetonitrile, dioxane, polypropylene glycol, other solvents miscible with water or that will dissolve phosphonucleotides in non-aqueous systems (such as is used in synthetic reactions). Naturally derived or synthetic oils with or without surfactants or emulsifiers can be used, e. g., plant-sourced oils, crop oils.

[0153] In certain embodiments, an organosilicone preparation that is commercially available as Silwet® L-77 surfactant having CAS Number 27306-78-1 and EPA Number: CAL.REG.NO. 5905-50073-AA, and currently available from Momentive Performance Materials, Albany, N.Y. can be used to prepare a polynucleotide composition. In certain embodiments where a Silwet® L-77 organosilicone preparation is used as a pre-spray treatment of plant leaves or other plant surfaces, freshly made concentrations in the range of about 0.015 to about 2 percent by weight (wt percent) (e. g., about 0.01, 0.015, 0.02, 0.025, 0.03, 0.035, 0.04, 0.045, 0.05, 0.055, 0.06, 0.065, 0.07, 0.075, 0.08, 0.085, 0.09, 0.095, 0.1, 0.2, 0.3, 0.4, 0.5, 0.6, 0.7, 0.8, 0.9, 1.0, 1.1, 1.2, 1.3, 1.4, 1.5, 1.6, 1.7, 1.8, 1.9, 2.0, 2.1, 2.2, 2.3, 2.5 wt percent) are efficacious in preparing a leaf or other plant surface for transfer of polynucleotide molecules into plant cells from a topical application on the surface. In certain embodiments of the methods and compositions provided herein, a composition that comprises a polynucleotide molecule and an organosilicone preparation comprising Silwet® L-77 in the range of about 0.015 to about 2 percent by weight (wt percent) (e. g., about 0.01, 0.015, 0.02, 0.025, 0.03, 0.035, 0.04, 0.045, 0.05, 0.055, 0.06, 0.065, 0.07, 0.075, 0.08, 0.085, 0.09, 0.095, 0.1, 0.2, 0.3, 0.4, 0.5, 0.6, 0.7, 0.8, 0.9, 1.0, 1.1, 1.2, 1.3, 1.4, 1.5, 1.6, 1.7, 1.8, 1.9, 2.0, 2.1, 2.2, 2.3, 2.5 wt percent) is used or provided.

[0154] According to some embodiments, the polynucleotide compositions that comprise an organosilicone preparation can comprise a salt such as ammonium chloride, tetrabutylphosphonium bromide, and/or ammonium sulfate. Ammonium chloride, tetrabutylphosphonium bromide, and/or ammonium sulfate can be provided in the polynucleotide composition at a concentration of about 0.01% to about 5% (w/v).

[0155] According to some embodiments, other useful transfer agents or adjuvants to transfer agents that can be used in polynucleotide compositions provided herein include surfactants and/or effective molecules contained therein. Surfactants and/or effective molecules contained therein include, but are not limited to, sodium or lithium salts of fatty acids (such as tallow or tallowamines or phospholipids) and organosilicone surfactants. In certain embodiments, the polynucleotide compositions that comprise a transfer agent are formulated with counter-ions or other molecules that are known to associate with nucleic acid molecules. Illustrative examples include, tetraalkyl ammonium ions, trialkyl ammonium ions, sulfonium ions, lithium ions, and polyamines such as spermine, spermidine, or putrescine.

[0156] In certain embodiments, the polynucleotide compositions further include glycerin. Glycerin can be provided in the composition at a concentration of about 0.1% to about 1% (w/v or v/v). A glycerin concentration of about 0.4% to about 0.6%, or about 0.5% (w/v or v/v) can also be used in the polynucleotide compositions that comprise a transfer agent.

[0157] In certain embodiments, the polynucleotide compositions further include an organic solvent. Non-limiting examples of suitable organic solvents include, but are not limited to, DMSO, DMF, pyridine, N-pyrrolidine, hexamethylphosphoramide, acetonitrile, dioxane, polypropylene glycol, other solvents miscible with water or that will dissolve phosphonucleotides in non-aqueous systems (such as is used in synthetic reactions).

[0158] In certain embodiments, the polynucleotide compositions further include a naturally derived or synthetic oil with or without a surfactant and/or an emulsifier. Non-limiting examples of suitable oils include, but are not limited to, plant-sourced oils, crop oils, paraffinic oils, polyol fatty acid esters, or oils with short-chain molecules modified with amides or polyamines such as polyethyleneimine or N-pyrrolidine.

[0159] Compositions and methods of the invention are useful for modulating or suppressing the expression of an endogenous target gene or transgenic target gene in a plant cell or plant. In certain embodiments of the methods and compositions provided herein, expression of genes targeted by the polynucleotides disclosed herein can be suppressed completely, partially and/or transiently to result in improved yield.

[0160] Target genes and plants containing those target genes can be obtained from: i) row crop plants; ii) vegetable plants; iii) culinary plants; iv) fruit plants; v) a tree grown for ornamental or commercial use; or, vi) trees in natural forests or, vii) an ornamental plant. The methods and compositions provided herein can also be applied to plants produced by a cutting, cloning, or grafting process.

[0161] Compositions comprising a polynucleotide and a transfer agent provided herein can be topically applied to a plant or plant part by any convenient method, e.g., spraying or coating with a powder, or with a liquid composition comprising any of an emulsion, suspension, or solution. Such topically applied sprays or coatings can be of either all or of any a portion of the surface of the plant or plant part. Similarly, the compositions comprising a transfer agent or other pre-treatment can in certain embodiments be applied to the plant or plant part by any convenient method, e. g., spraying or wiping a solution, emulsion, or suspension. Compositions comprising a polynucleotide and a transfer agent provided herein can be topically applied to plant parts that include, but are not limited to, roots, flowers, stems, tubers, meristems, ovules, fruit, anthers, pollen, leaves, or seeds.

[0162] According to some embodiments, the composition may be provided by irrigation e.g. using an existent or a designated irrigation system.

[0163] Application of compositions comprising a polynucleotide and a transfer agent to seeds is specifically provided herein. Seeds can be contacted with such compositions by spraying, misting, immersion, and the like. According to some embodiments, progeny plants, plant parts, derived from treated seeds will exhibit an improved yield that result from suppressing expression of the target gene.

[0164] Various methods of spraying compositions on plants or plant parts can be used to topically apply to a plant surface a composition comprising a polynucleotide that comprises a transfer agent. In the field, a composition can be applied with a boom that extends over the crops and delivers the composition to the surface of the plants or with a boomless sprayer that distributes a composition across a wide area. Agricultural sprayers adapted for directional, broadcast, or banded spraying can also be used in certain embodiments. Sprayers adapted for spraying particular parts of plants including, but not limited to, leaves, the undersides of leaves, flowers, stems, male reproductive organs such as tassels, meristems, pollen, ovules, and the like can also be used. Compositions can also be delivered aerially, such as by a crop-dusting airplane. In certain embodiments, the spray can be delivered with a pressurized backpack sprayer calibrated to deliver the appropriate rate of the composition.

[0165] In certain embodiments, plant parts can be sprayed either pre- or post-harvest to provide improved yield in the plant part. Compositions can be topically applied to plant parts attached to a plant by a spray as previously described. Compositions can be topically applied to plant parts that are detached from a plant by a spray as previously described or by an alternative method. Alternative methods for applying compositions to detached parts include, but are not limited to, passing the plant parts through a spray by a conveyor belt or trough, or immersing the plant parts in the composition.

[0166] Compositions comprising polynucleotides and transfer agents can be applied to plants or plant parts at one or more developmental stages as desired and/or as needed. Application of compositions to pre-germination seeds and/or to post-germination seedlings is provided in certain embodiments. Seeds can be treated with polynucleotide compositions provided herein by methods including, but not limited to, spraying, immersion, or any process that provides for coating, imbibition, and/or uptake of the polynucleotide composition by the seed. Seeds can be treated with polynucleotide compositions using seed batch treatment systems or continuous flow treatment systems. Seed treatment can also be applied in laboratory or commercial scale treatment equipment such as a tumbler, a mixer, or a pan granulator. A polynucleotide composition used to treat seeds can contain one or more other desirable components including, but not limited to liquid diluents, binders to serve as a matrix for the polynucleotide, fillers for protecting the seeds during stress conditions, and plasticizers to improve flexibility, adhesion and/or spreadability of the coating. In addition, for oily polynucleotide compositions containing little or no filler, drying agents such as calcium carbonate, kaolin or bentonite clay, perlite, diatomaceous earth or any other adsorbent material can be added.

[0167] Application of the compositions in early, mid-, and late vegetative stages of plant development is provided in certain embodiments. Application of the compositions in early, mid-, and late reproductive stages is also provided in certain embodiments. Application of the compositions to plant parts at different stages of maturation is also provided.

[0168] The following examples are included to demonstrate examples of certain preferred embodiments of the invention. It should be appreciated by those of skill in the art that the techniques disclosed in the examples that follow represent approaches the inventors have found function well in the practice of the invention, and thus can be considered to constitute examples of preferred modes for its practice. However, those of skill in the art should, in light of the present disclosure, appreciate that many changes can be made in the specific embodiments that are disclosed and still obtain a like or similar result without departing from the spirit and scope of the invention.

### EXAMPLES

### Example 1—Verifying Improved Yield Trait of Plants

[0169] The applying of the composition (by irrigation or spraying for example) is timed according to the transcription of the target gene and the desired trait it affects. Examples of suitable timing is outlined in TABLE 2, which shows selected examples of suitable timing for applying compositions based on the genes targeted (here for oilseed rape) and indication of same. The dsRNA mixture is applied according to the timing of the expression of the specific gene, namely a week before, on the expected peak of expression and a week after the peak of its expression. Following the treatment, the phenotype of the plant, with regards to the yield trait targeted, is inspected, as for example outlined in TABLE 2 which shows selected examples of traits and their related genes.

### Example 2—Testing Transfer Agent Permeability

[0170] In order to test the permeability of a transfer agent a 0.01% to 1% or 0.1-10 mg/ml transfer agent solution was sprayed on a leaf and the contact angle evaluated using standard methods.

[0171] The efficiency of the tested transfer agents is shown in FIG. 1 which shows the contact angle (indicative of penetration) as a function of time after application on a leaf of the plant. As seen, all the tested transfer agents significantly reduced the contact angle as compared to when no transfer agent was applied.

### Example 3—Increased Branching by Targeting BRC1 in an Oilseed Rape

[0172] dsRNA molecules (SEQ ID NO: 730) directed against BnBRC1 of oilseed rape (Brassica napus) (SEQ ID NO: 1) was applied using a sprayer at a dsRNA concentration of 1 ng/ml to 1 mg/ml diluted in 0.01% to 1% or 0.1-10 mg/ml surfactant, here Siloxane Polyalkyleneoxide Copolymer (Silwet® L-77 AG) however other surfactants such as those listed in TABLE 1 may likewise be used. The BnBRC1 (SEQ ID NO: 730) dsRNA was applied from beginning of bolting to second inflorescence appearance.

[0173] Following the treatment, the branching of the plant was evaluated by visual inspection. As shown in FIG. 3, which shows illustrative images of Brassica napus plants following topical application of the dsRNA, the branching of the plant significantly increased (5-6 branches per plant in mock treated control plants (left) and 9-10 branches per plant in BnBRC1 dsRNA treated plants with a dsRNA comprising the sequence set forth in SEQ ID NO: 730 (right).

### Example 4—Ectopic Application of dsRNA Affecting Petal Configuration of Oilseed Rape in Greenhouse and Field

[0174] dsRNA molecules (SEQ ID NO: 733) directed against Brassica napus gene BnPTL (SEQ ID NO: 286) was applied using a hand sprayer at a dsRNA concentration of 1 ng/ml to diluted in 0.01% to 1% or 0.1-10 mg/ml surfactant, here Siloxane Polyalkyleneoxide Copolymer (Silwet® L-77 AG), however other surfactants such as those listed in TABLE 1 may likewise be used. The dsRNA was applied when the plant reached 70% to full stem length.

[0175] Following the treatment, the number of petals was evaluated by visual inspection. FIG. 2, shows preliminary, illustrative images of oilseed rape plants, here Brassica napus following topical application of the BnPTL dsRNA. In mock treated plants (left) normal petals configuration is seen, while the BnPTL dsRNA treated plant (right) showed abnormal petals configuration (three petals per flower or asymmetrical flowers), demonstrating the ability of the topically applied dsRNA to affect the petal configuration of oilseed rape plants.

### Example 5—Ectopic Application of dsRNA for Yield Enhancement—Oil Rapeseed

[0176] Oilseed rape var. Belinda seeds (Brassica napus) were sown in 3-liter pots in a controlled greenhouse, one plant per pot, watered and fertilized once a day. The plants were treated with dsRNA molecules (SEQ ID NO: 733) directed against BOOT: gene (SEQ ID NO: 286)—hereinafter referred to a treatment ‘A’ in all further descriptions) and dsRNA molecules (SEQ ID NO: 730) directed against BnBRC1 gene (SEQ ID NO: 1)—hereinafter referred to a treatment ‘B’. The treatment was applied according to the appropriate development stage of the plant, as set forth in TABLE 2 below, in a concentration of 1 and 10 μg/ml dsRNA diluted in surfactant (Silwet® L-77 AG), 10 ml per plant.

[0177] Phenotypic evaluations were made one month after applying the treatment and the result compared to Ctrl (surfactant only), for flower morphology of ‘A’ (BnPTL dsRNA) and branch number for ‘B’ (BnBRC1 dsRNA).

### Method

[0178] Oilseed rape seeds were sown in 2×1,000 m² fields, in the Sharon region, Israel (32° 10′1.55″N 34° 52′33.96″E), divided into 12 rows of 52 m×0.8 m, each row spaced by a 40 cm clear lane.

[0179] The seeds were sown in about 15 cm distance between each seed, and in 2 cm depth using hand pushed sower.

[0180] Each row was plotted to 0.8 m×2 m divided by 1 m of untreated plants as spacers between adjacent different treatments, about 70 plants per plot.

[0181] Five dsRNAs were tested, namely:
[0182] 1) dsRNA molecules (SEQ ID NO: 733) directed against Brassica napus BOIL gene (SEQ ID NO: 286)—hereinafter termed treatment ‘A’,
[0183] 2) dsRNA molecules (SEQ ID NO: 730) directed against Brassica napus BnBRC1 gene (SEQ ID NO: 1)—hereinafter termed treatment ‘B’,
[0184] 3) dsRNA molecules (SEQ ID NO: 731) directed against Brassica napus BnCKX2 gene (SEQ ID NO: 158) hereinafter termed treatment ‘C’;
[0185] 4) dsRNA molecules (SEQ ID NO: 732) directed against Brassica napus BnKIN10 gene (SEQ ID NO: 62)—hereinafter termed treatment ‘D’;
[0186] 5) dsRNA molecules (SEQ ID NO: 729) directed against Brassica napus BnADPG1 gene (SEQ. ID NO: 235)—hereinafter termed treatment ‘E’.

[0187] The dsRNAs were sprayed with 200 ml of water supplemented with dsRNA and surfactant for each plot. The dsRNA treatment was applied according to the peak of expected expression timing of each selected gene during the plants' growing stage (as set forth in TABLE 2).

TABLE 2
Oilseed rape plant's development stage used for dsRNA
application for each gene and their phenotype evaluations.

| | Desired | Target | |
|---|---|---|---|
| Crop | Trait | Gene Name | Target Gene Annotation |
| Oilseed | Increased | BnBRC1 | Protein Transcription factor |
| Rape | Branching | | TCP18 BRANCHED1 (BRC1) |
| | | BnBRC1L | BRC1 Like |
| | | BnMAX1-4 | Cytochrome P450 |
| | Increased | BnICK1-7 | Cyclin-Dependent Kinase |
| | Seed Size | | (CDK) Inhibitor 1-7 |
| | | BnCKX1-7 | Cytokinin Oxidase 1-7 |
| | | BnGA2ox1-8 | gibberellin 2-oxidase 1 |
| | | BnDA1 | Ubiquitin receptor |
| | | BnDA2 | E3 ligase |
| | | BnEOD1 | E3 ligase |
| | | BnAP2 | APETALA 2 (AP2) |
| | | | Transcription factor |
| | Increased | BnSAMBA.1 | plant-specific anaphase- |
| | Seed | | promoting complex/cyclosome |
| | Number | | (APC/C) regulator |
| | Large | BnMYB12 | MYB transcription factor 12 |
| | Siliques | BnMYB111 | MYB transcription factor 111 |
| | | BnCHI | chalcone isomerase |
| | | BnF3H | naringenin,2-oxoglutarate 3- |
| | | | dioxygenase |
| | | BnF3′H | flavonoid 3′-monooxygenase |
| | | BnFLS | flavonol synthase 3-like |
| | | BnMIM858 | miR858 target mimic |
| | Decreased | BnNST1 | NAC SECONDARY WALL |
| | Shattering | | THICKENING PROMOTING |
| | | | FACOTR1 |
| | | BnSND1 | SECONDARY WALL- |
| | | | ASSOCIATED NAC DOMAIN |
| | | | PROTEIN 1 |
| | | BnADPG1 | ARABIDOPSIS |
| | | | DEHISCENCE ZONE |
| | | | POLYGALACTURONASE 1 |
| | | BnADPG2 | ARABIDOPSIS |
| | | | DEHISCENCE ZONE |
| | | | POLYGALACTURONASE 2 |
| | Petals | BnPTL | trihelix transcription factor |
| | reduction | | PTL-like |
| | Early | BnARP6 | ACTIN-RELATED |
| | Flowering | | PROTEIN 6 |
| | | BnFLC1-5 | MADS-box protein |
| | | | FLOWERING LOCUS C 1-5 |
| | | BnSVP | SHORT VEGETATIVE |
| | | | PHASE (SVP) |
| | Late | BnPIF4 | PHYTOCHROME |
| | flowering | | INTERACTING FACTOR 4 |
| | | | (PIF4) |
| Soy | Increased | GmBRC1 | TCP transcription factor |
| | branching | | BRANCHED1 (BRC1) |
| | | GmFRZ2 | Rice homologue of Cdh1. |
| | | | activator of the anaphase |
| | | | promoting complex/cyclosome |
| | | | (APC/C) complex |
| | Seed | GmBS1 | Plant-specific transcription |
| | Filling | | regulator |
| | | GmPLDα1 | Phospholipase D alpha 1 |
| | | | (PLD alpha 1). Positive regulator |
| | | | of abscisic acid (ABA) mediated |
| | | | stomatal movements. |
| | | GmJAG1 | Putative zinc finger |
| | | | transcription factor |
| | Increased | GmCKX1 | Cytokinin Oxidasee 1 |
| | Seed | | (CKX1) |
| | Number | | |
| Rice | Incresed | OsBRC1 | TCP transcription factor |
| | Tillering | | BRANCHED1 (BRC1) |
| | | OsGSK2 | SHAGGY-like kinase |
| | Increased | OsPIN5b | Auxin efflux carrier-like |
| | Panicles | | protein |
| | | OsFZP | Ethylene-responsive |
| | | | transcription factor |
| | Grain | OsSKIN1 | plant-specific SnRK1A- |
| | Filling | | interacting negative regulator |
| | | OsGNI1 | homeodomain leucine zipper |
| | | | class I (HD-Zip I) transcription |
| | | | factor |

[0188] For each treatment, two dsRNA dosages (1 or 10 μg/ml) and two spray regimens (1 or 5 times in the 1^{st} field and 1 or 3 times in the 2^{nd} field) were conducted, as set forth in TABLE 3. Gaps between subsequent treatments is one week.

TABLE 3
Field trials parameters.

| | Surfactant | Number of treatments |
|---|---|---|
| Field | Silwet ® L-77 AG | 1 - on the timing as in |
| 1 | (0.03%) | TABLE 2 |
| | | 5 - two weeks before, one |
| | | week before, on the timing as TABLE 2, |
| | | one week after and two weeks after the |
| | | timing as TABLE 2 |
| Field | GENAGEN ™ 4166 | 1 - on the timing as in |
| 2 | (0.05%) | TABLE 2 |
| | | 3 - one week before, on |
| | | the timing as TABLE 2 and one week |
| | | after the timing as in TABLE 2 |

[0189] Surfactant only (without dsRNA) in the same timing was utilized as control (ctrl).

[0190] Each treatment was repeated 10 times in different plots, the sprayings were performed using “Solo” 2-liter hand sprayer with the smallest drop size.

[0191] At the end of the growing season the plots were hand harvested, dried for one week, processed by a threshing machine (Classic ST, Wintersteiger, Germany), and weighted for net seed weight for each plot/treatment.

[0192] All field data was statistically analyzed (P<0.1) for each dsRNA treatment compared to its relevant Ctrl.

[0193] The weight of 1,000 seeds was measured using a designated seed counting machine (Contador, Pfeuffer, Germany) with 5 replicates for each plot, combined with total weight of fixed volume. Oil content were measured according to Soxhlet” extraction method at the “Biotechnology Engineering Faculty, Ben-Gurion University, Be'er Sheva, Israel, using hexane as a solvent.

### Results

### Treatment a

### Flower Morphology

[0194] For treatment ‘A’ flower morphology was evaluated three weeks after application of the sdRNA.

[0195] As seen from FIG. 2, a change in flower morphology was observed in the dsRNA treated plants only. In each inflorescence at least one flower was lacking one petal, as compared to controls. In addition, inflorescence development and flowering were delayed by about 2 weeks in the dsRNA treated plants, as compared to control.

### Light Penetration Percentage:

[0196] Three weeks after spray application of the dsRNA (SEQ ID NO: 733), light penetration percentage at the base of the inflorescences was measured. The measurements took place after flowering peak. dsRNA treatment caused a significant reduction in light penetration for all treatments applied, namely: 1-1 (1-1=1 μg/ml, 1 treatment), 10-1 (10-1=10 μg/ml, 1 treatment), 1-5 (1-5=5 treatments) and 10-5 (10-5=10 μg/ml, 5 treatments) causing 42.3%, 45.1%, 47.6% and 50% reduction in light penetration respectively, as compared to controls.

[0197] These results show that reducing BnPTL expression (SEQ ID NO: 286) by ectopic administration of dsRNA molecules targeting PTL reducing petals number which in turn will lead to increase light penetration to the plant's lower parts and will increased total photosynthesis efficiency and yield.

### Seed Weight:

[0198] In the 1^{st} field, treatments 1-5 and 10-5 increased seed weight by 4.9% and 9.4% respectively (FIG. 5A). In the 2^{nd} field, treatment 10-1 increased seed weight by 17.5%. (FIG. 5B).

[0199] These results indicate that reducing BnPTL expression by ectopic administration of dsRNA targeting BnPTL can increase seed weight.

### Oil Content:

[0200] In the 1^{st} field a consistent increase in oil content was observed in the dsRNA treated plants 1.4%, 1.9% and 1.1% (for treatments 1-1, 1-5 and 10-1, respectively—FIG. 6A).

[0201] In the 2^{nd} field, a larger increase of 6%, 2.4%, 5.9% and 2.3% (for treatments 1-1, 1-3, 10-1 and 10-3, respectively—FIG. 6B) was observed.

[0202] These results indicate that reducing BnPTL expression by ectopic administration of dsRNA targeting BnPTL can increase oil content of the oilseed rape plant.

### Treatment B

### Branch Numbers:

[0203] For treatment ‘B’ the number of branches was evaluated three weeks after application of the dsRNA.

[0204] As seen from FIG. 3, the number of branches increased, as a result of the dsRNA treatment (10 μg/ml) and as further seen from FIG. 4 the increase in the number of branches was dose-dependent. (P<0.1).

[0205] As seen from FIG. 7, showing field results of targeting BnBRC1 (SEQ ID NO: 1) expression by ectopic administration of dsRNA (SEQ ED NO: 730 targeting BnBRC1) resulted in an increase in the number of branches) 8.2%, 5.9% and 16.4% for treatments 1-1, 1-5 and 10-5 respectively as compared to controls.

### Treatment C

### Seed Weight:

[0206] As seen from FIGS. 8A and 8B, targeting BnCKX2 (SEQ ID NO: 158) expression by ectopic administration of dsRNA (SEQ ID NO: 731) targeting CKX2 resulted in an increased seed weight in both fields tested. In the 1^{st} field, treatments 1-1, 1-5, 10-1 and 10-5, the increase was 2.1%, 1.3%, 1.3% and 4% respectively (FIG. 8A). In the 2^{nd} field treatments 1-1, 10-1 and 10-3 increased seed weight by 1.2%, 15.6% and 9%, respectively (FIG. 8B).

### 1,000 Seed Weight and Seed Size:

[0207] In addition, targeting BnCKX2 expression by ectopic administration of dsRNAs targeting BnCKX2 resulted in an increased 1,000 seed weight by 3.9%, 3.5% and 1.6% for treatments 1-1, 1-5 and 10-1 of the 1^{st} field, relative to Ctrl. The seed size in treatments 1-1, 1-5 and 10-5 likewise increased by 1.1%, 5.1% and 1.2% respectively.

[0208] In the 2^{nd} field, targeting BnCKX2 caused an increase to the 1,000 seed weight by 5.8%, 1.5% and 1.1% for treatments 1-3, 10-1 and 10-3, respectively. The seed size, in treatments 1-3, 10-1 and 10-3 was likewise increased by 4.1%, 0.7% and 3.8% respectively.

[0209] These results clearly show that targeting BnCKX2 expression by ectopic administration of dsRNAs targeting BnCKX2 increases weight and size of oilseed rape seeds.

### Treatment E

### Seed Weight:

[0210] As seen in FIGS. 9A and 9B, targeting BnADPG1 (SEQ ID NO: 235) expression by ectopic administration of dsRNA (SEQ ID NO: 729) targeting BnADPG1 resulted in an increased seed weight in both fields tested. In the 1^{st} field, treatments 1-1, 1-5 and 10-1, the increase was 9.5%, 9.4%, 12% respectively. In the 2^{nd} field treatments 1-3, 10-1 and 10-3 increased seed weight by 11.4%, 14.2% and 10.1%, respectively.

### 1,000 Seed Weight and Seed Size:

[0211] Targeting ADPG1 expression by ectopic administration of dsRNAs targeting BnADPG1 resulted in an increased 1,000 seed weight by 4.5%, 7.7%, 6% and 7% for treatments 1-1, 1-5, 10-1 and 10-5 of the 1^{st} field, relative to Ctrl. The seed size in treatments 1-1, 1-5, 10-1 and 10-5 was likewise increased by 6.8%, 8.2%, 1.1% and 8.1% respectively.

[0212] In the 2^{nd} field, targeting BnADPG1 caused an increase to the 1,000 seed weight by 14.7%, 3% and 13.3% for treatments 1-3, 10-1 and 10-3, respectively. The seed size, in treatments 1-1, 1-3, 10-1 and 10-3 was likewise increased by 2%, 13.3%, 2.2% and 9.6% respectively.

[0213] These results clearly show that targeting BnADPG1 expression by ectopic administration of dsRNAs targeting BnADPG can increase weight and size of oilseed rape seeds.

### Oil Content:

[0214] In the 1^{st} field an increase in oil content was observed in the BnADPG1-dsRNA treated plants (1.5%, 2.2% and 1.5% for treatments 1-1, 10-1 and 10-5, respectively—FIG. 10A). Similarly, In the 2^{nd} an increase in oil content of 2.1%, 1.5% and 4.1% was observed in treatments 1-3, 10-1 and 10-3 respectively, as compared to control (FIG. 10B).

### Example 6—Ectopic Application of dsRNA for Yield Enhancement—Rice (Oryza sativa)

### Materials and Methods:

[0215] Rice (Oryza sativa spp.) seeds were sown in 3-liter pots, one seed per pot in greenhouse, watered and fertilized once a day.

[0216] The plants were treated as with 10 μg/ml (in water and surfactant) of the below listed dsRNAs:
[0217] 1) dsRNA molecules (SEQ. ID NO: 742) directed against OsBRC1 of rice (SEQ ID NO: 43),
[0218] 2) dsRNA molecules (SEQ ID NO: 744) directed against OsPIN5b of rice (SEQ ID NO: 86),
[0219] 3) dsRNA molecules (SEQ ID NO: 746) directed against OsSKIN1 of rice (SEQ ID NO: 52),

[0220] The dsRNAs were applied according to the plants' development stage, as set forth in TABLE 4 below.

TABLE 4
Rice (O. sativa) plants developing stage
used for specific dsRNA treatments.

| dsRNA | Development stage of treatment |
|---|---|
| SEQ ID NO: 742 | axillary buds start to emerge |
| SEQ ID NO: 744 | Plants at maximum tiller number |
| SEQ ID NO: 746 | Plants at seed filling stage |

[0221] The dsRNAs were applied as one time spraying, in a concentration of either 1 or 10 μg/ml, diluted in surfactant (Silwet® L-77 AG), 10 ml per plant, six pots/plants for each treatment.

[0222] The treatments were evaluated one month after application of dsRNA and compared to Ctrl. For OsBRC1 the number of axillary tillers was evaluated, for OsPIN5b, the number of panicles was evaluated and for OsSKIN1 seed size was evaluated. Total seed weight was measured for all treatments.

### Results

[0223] One month after treatment, total number of tillers of the plants treated with a dsRNAs targeting OsBRC1 of the rice plants (SEQ ID NO: 742) was counted and compared to control. Interestingly, treating the plants with a low concentration of OsBRC1-dsRNA caused a slight increase in the number of tillers, whereas a high concentration caused a decrease in the number of tillers (FIG. 11). This indicates that dsRNAs targeting OsBRC1 can be used to control the number of tillers in rice.

[0224] Three months after treatment, the number of panicles in the rice plants treated with dsRNAs targeting OsPIN5b (SEQ ID NO: 744 and 745) as comparted to control is evaluated.

[0225] Three months after treatment, the total seed weight is measured for all treatments.

### Example 7—Ectopic Application of dsRNA for Yield Enhancement—Soybean (Glycine max)

### Materials and Methods:

[0226] Soybean (Glycine max, Williams82 variety) seeds were sown in 3-liter pots, one seed per pot, in greenhouse, watered and fertilized once a day, or as needed.

[0227] Several examples of dsRNAs applications (as specified below), targeted to cause a phenotypic change and increase yield were tested:
[0228] 1) SEQ ID NO: 734 directed against GmBRC1 of soybean (SEQ ID NO: 15).
[0229] 2) SEQ NO: 738 directed against GmJAG1 of soybean (SEQ ID NO: 153).
[0230] 3) SEQ ID NO: 736 directed against GmBS1 of soybean (SEQ ID NO: 116).
[0231] 4) SEQ ID NO: 740 directed against GmPLDα1 of soybean (SEQ ID NO: 124).

[0232] The dsRNAs were applied according to the plants' development stage, as set forth in TABLE 5 below.

TABLE 5
Soybean (G. max) plants developing stage
used for specific dsRNA treatments.

| dsRNA | Development stage of treatment |
|---|---|
| SEQ ID NO: 734 | Bolting stage |
| SEQ ID NO: 738 | Flowering stage |
| SEQ ID NO: 736 | Seed filling stage |
| SEQ ID NO: 740 | Seed filling stage |

[0233] The dsRNAs were applied as two sprays, 1^{st} spray at the presumed peak of the gene expression timing and 2^{nd} spray two weeks later. The dsRNA was applied in a concentration of 1 μg/ml or 10 μg/ml, diluted in surfactant (Silwet® L-77 AG), 10 ml per covering the whole plant surface, six pots/plants for each treatment. Each dsRNA trial was conducted in six replicas.

[0234] The treatments were evaluated one month after applying the dsRNA and compared to Ctrl. For GmBRC1 targeting, the number of axillary branches was evaluated; for GmJAG1 targeting, seed number per pod was evaluated, for GmBS1 targeting, the seed size was evaluated; and for GmPLDα1, seed weight/filling was evaluated. In addition, total seed weight was measured for all treatments.

### Results

[0235] One month after treatment plants treated with dsRNA targeting GmBRC1—were evaluated for total number axillary branches. As seen in FIG. 12 dsRNA treated plants had higher number of branches as compared to the Ctrl plants. Interestingly, the largest increase (54.1%) was observed for the lower dsRNA concentration.

[0236] One month after dsRNA treatment targeting GmJAG1, the plants are evaluated for total number of seeds per pod.

[0237] After total drying of the plants' pods, the plants treated with dsRNA targeting GmBS1 are evaluated for seed size, and the plants treated with dsRNA targeting GmPLDα1 for total seed weight.

[0238] While certain embodiments of the invention have been illustrated and described, it will be clear that the invention is not limited to the embodiments described herein. Numerous modifications, changes, variations, substitutions and equivalents will be apparent to those skilled in the art without departing from the spirit and scope of the present invention as described by the claims, which follow.

1. A composition comprising:
a dsRNA molecule that comprises at least 18 contiguous nucleotides that are essentially identical or essentially complementary to a portion of a plant gene or a transcript of the plant gene; and
a transfer agent configured to facilitate permeation of the dsRNA molecule into cells of the plant;
wherein permeation of the dsRNA molecule into cells of the plant causes a transient reduction in the expression of the gene, and
wherein the transient reduction in the expression of the gene causes a change in a trait of the plant, the trait of the plant selected from the group consisting of increased branching, increased grain filling, increased T6P levels, increased number of panicles, increased seed filling, increased seed number, increased seed size, decreased shattering, decreased abscise tissue formation, increased number of tillers, increased heading in the plant, petal reduction, increase siliques size, late or early flowering, delayed senescence and any combination thereof.

2. The composition of claim 1, wherein the plant gene is selected from ADPG1, PTL, CKX2, BRC1, KIN10, SKIN1, PIN5b, JAG1, BS1, PLDα1 and/or or any homolog or combination thereof.

3. The composition of claim 1, wherein the plant gene is selected from ADPG1, PTL, CKX2, BRC1 and/or or any homolog or combination thereof.

4. The composition of claim 1, wherein the plant is an oilseed rape plant and wherein the dsRNA molecule comprises at least 18 contiguous nucleotides that are essentially identical or essentially complementary to a portion of a sequence encoding any of the amino acid sequences set forth in NO SEQ ID NO: 599, SEQ ID NO: 650, SEQ ID NO: 522 and SEQ ID NO: 365.

5. The composition of claim 1, wherein the plant is a soybean plant, and wherein the dsRNA molecule comprises at least 18 contiguous nucleotides that are essentially identical or essentially complementary to a portion of a sequence encoding any of the amino acid sequences set forth in SEQ ID NO: 379, SEQ ID NO: 603, SEQ ID NO: 655, SEQ ID NO: 564, SEQ ID NO: 517, SEQ ID NO: 480 and SEQ ID NO: 488.

6. The composition of claim 5, wherein the plant is a soybean plant, and wherein the dsRNA molecule comprises at least 18 contiguous nucleotides that are essentially identical or essentially complementary to a portion of a sequence encoding any of the amino acid sequences set forth in SEQ ID NO: 379, SEQ ID NO: 517, SEQ ID NO: 480 and SEQ ID NO: 488.

7. The composition of claim 1, wherein the plant is a rice plant, and wherein the dsRNA molecule comprises at least 18 contiguous nucleotides that are essentially identical or essentially complementary to a portion of a sequence encoding any of the amino acid sequences set forth in SEQ ID NO: 407, SEQ ID NO: 610, SEQ ID NO: 659, SEQ ID NO: 589, SEQ ID NO: 416 and SEQ ID NO: 450.

8. The composition of claim 7, wherein the plant is a rice plant, and wherein the dsRNA molecule comprises at least 18 contiguous nucleotides that are essentially identical or essentially complementary to a portion of a sequence encoding any of the amino acid sequences set forth in SEQ ID NO: 407, SEQ ID NO: 416 and SEQ ID NO: 450.

9. The composition of claim 1, wherein said dsRNA molecule is at least about 50 bases in length.

10. The composition of claim 9, wherein said dsRNA molecule is at least about 200 bases in length.

11. The composition of claim 1, wherein the transfer agent comprises N, N-dimethyl Decanamide, coco amidopropyldimethyamine, Siloxane Polyalkyleneoxide Copolymer, AG-RHO® EM-30, Dimethylamide of C8/C10 fatty acid, esterified copolymer of glycerol, trisiloxane ethoxylate or any combination thereof.

12. A method for topically applying to a plant surface the composition of claim 1.

13. The method of claim 12, wherein the applying comprises spraying the composition onto the surface of a plant.

14. The method of claim 13, wherein the composition is sprayed onto the surface of a plant with a boom that extends over a crop, a boomless sprayer, an agricultural sprayer, a crop-dusting airplane, a pressurized backpack sprayer, a track sprayer, or a laboratory sprayer/submerger.

15. The method of claim 12, wherein the applying comprises providing the composition through an irrigation system.

16. The method of claim 12, wherein the plant surface is the surface of one or more plant part selected from the group consisting of hypocotyl, cotyledon, leaf, flower, stem, tassel, meristem, pollen, ovule, and fruit.

17. The method of claim 12, further comprising timing the applying of the composition at a desired developmental stage of the plant.

The application's sequence listing, which the Patent Office published only in electronic form, follows.

SEQUENCE LISTING (747 sequences)

SEQ ID NO: 1 - DNA, 1275 bp, Brassica napus
atgaacaacaggtctttcagtactaccaccaccatcagtgaagactacatgttattcccttataatgaccattattcctcacaaccactactcccttttaacccttgttcttccatcaatgacatcttgattcactccaactccaacatatcaagcaatcctcttgaccatcattatcaattcttacaagcaccttcttctttttctcaattcgaattcgtcccggattttgccctcgtcgcctctttcctcccacaaaacaatggccataatgataaccaaaccatcaccaccaatgaccataataataatcatcatcatcatcatccatcacttcttcccttgaacaaccctattggagaatctctcgttgagcccttggagacgatagccactcacatagaagattcccagagaatctcaacttcccaagacccaaaaatgaataaagtcaagaaaccaagcagaacggatcggcacagcaagatcaaaacggctaaagggacaagagatcgtaggatgaggctctcgctagatgtcgccaaagagttgttcggcttacaagacatgcttggattcgacaaagccagcaaaaccgttgaatggttgctcacacaagccaaacccgagatcataaagatcacgagcagcctttctaacccgttaaaccatggcggcttcagcagctgcgaggagtctcaaacccgaccggcgttaggatcaatgcacacatcgtctgatctgtgcaagctttcatccatggggacagtcgaggatagaggcagcaatactaactcgaccgaaacaagaggaaataaggtggatgggagatcgatgagagggaagagaaagatgttgcaagcgcgaacgcccattttgaagaagttatctaaggacgagagagcaaaagcaagagagagagcaaaggatagaacaaaggagaagttgatgaagagaagatcacaagtaactgttttggatgcagaagctcataatcagcatgatgagatagtaaagaataataaaagccatgtgaattgcaagtcttttgaggctacgccctgccaagaagagaccgaagaacttctttgcaagaacgatggttttgcagtttgcaatgaatttgtggtcaacaaatttaattcatcatttccaatgcctaatcaccatcgcagccaagggacagttagctcaatagagcagcgtcagtttatggatcttcatcacttcttggagagaccaagagacctcatgtacaactaccataatatgtga

SEQ ID NO: 2 - DNA, 972 bp, Brassica napus
atgaaaaatgccaagaaaccaagcagaacggaccggcacagcaagatcaaaacggctaaggggacaagagatcgtagaatgagactctctctagatgtcgccaaagaattgtttggcttacaagacatgcttggattcgacaaagccagcaagaccgttgaatggttgctcacacaagccaaacccgagatcataaagatcgccaacagcctttctaaccagtttaaacacggcggattcagcagcggagatgactcccaaacccgaccggcgttaggatcaacggagacatcgtctgatctatgcgaatttgcatctgtgtggacagtcgaggatagatgcagcaacactagcatgaccgaaaataaggtggatgggagaacaatgagagggaagagaaagatgtcgcagcgaacgcccattttgaaggagatgtctaaagatgccagagccaaagcaagagagagagcaaaggatagaacaatggagaagatcatgaagagaagaccacaagtaaatgccgtagaagaagtagaagctcataatcagcatgatgaggtagtaaagaataataattctggtgttaattggactacttcttttgaggtgacgcccagcggaaaaaatatggaagaactttgcaagaacaatcgtttcgcagtttacaacgatattgtggtgaataaaaaagatcacatttcggaagaatcatataatatgatcagccaattgaattcatcatttccaatgcttactcaccatcgcagccaaggtgcagctacttccatggagcagcagcagcatcaggttagggatgttcatcacttcttgtacaactatcataatatgtgatgatgatataaattaccgttaatttctcaaattaatatataataatttgtatatgtgagtcttatgaagcttttttgcttcactttcttgtcacatattaaatcgatgtaaaacaatcaa

SEQ ID NO: 3 - DNA, 1017 bp, Brassica napus
atgtttccttcaatagacaccaatggccatgacctctttgatcccttcaatctccatgaagcaaccatgtttccttctttcactactcatatcctaagccctagttctcaccatcattacccttttccttcttttccttcctcttcagattttcttgatgaatctgtcttgataagccaattcttgttacaacagcaagctaatgttgattctccgagaaaattatgcaaggagcttgagcaagaaaaaaagaatgaggagtgggttgatggaaccacctcagaaaaggtttcaccaagaagaactggaaagaaaagggacaggcatagtaagatctgcaccgctcatggtcctagagacaggaggatgagactgtctctccagattgctcgcaaattctttgatcttcaagacatgttgggtttcgacaaggctagcaagaccattgaatggcttatctccaaatcaaaggcctccatcaaacaagtgaaagaaagtgcagcagcagcagcatcaggaaaccatgaacatcttcaggttagtgacaatgtaaatgacaagacacagaaagtctcaaagggaagaacaaagagggtggatgactcttgtaagaagaaagagtcgagagagaaagctagagaacgagcaagagagagaacaatgacgaagatgaagatgagattatcaggaccgattgacacctcgaaaacatttgcagatcctaatcaagagtcaagaaagactaagataaccggtggtgcacaagtagaaggagaaaacctagaacaagaaaggagtattatagagaagtttcttggactaaccagtgaatctagctcctctaccatctttggagactccgaggaatcttacacaagtcttggctcaattagagaaacagtttcaacaggaggaatggtgataccaagggaacataacacaactttaacagcatcagtagatgaggagagaaaccctatttcaactttttctctatacgattatctctgctactga

SEQ ID NO: 4 - DNA, 999 bp, Brassica napus
atgtttccttcaatagacaccaatggctatgacctctttgatcccttcaatctccatgaagcaaccatgcttccttctttcactactcatatcctaagccctagttctcaccatcattacccttttccttcctcttcagattttcttgatgaatctgtcttgataagccaattcttgttacaacagcaagctgatgttgattctccgagaaaattacgtagggagcttgagcaagaaaaaaagaatgaggagtgggttgatggaaccacctcagaaaaggtttcaccaagaagaactggaaagaaaagggacaggcatagtaagatctgcaccgctcaaggtcctagagacaggaggatgagactgtctctccagattgctcgcaaattctttgatcttcaagacatgttgggtttcgacaaggcgagcaagaccattgaatggcttatctccaaatcaaaggcctccatcaaacaagtgaaagaaagtgcagcggcatcaggaaaccatgaacatcttcaggttagtgacaatgtaaatgacgagacacagaaagtctcaaagggaagaacaaagagggtggacgactcttgtaagaagaaacagtcgagagagaaagctagagaacgagcaagagagagaacaatgacgaagatgaagatgagattatcaggactgattgacacctcgaaaacatttgcagatcctaatcaagtgtcaagaaagactaagataatcggtggtgcacaagaaagagaaaacctagaacaagaaaggagtattatagagaagtttcttggactaaccagtgaatctagctcctctaccatctttggagactccgaggaatcttacacaagtcttggctcaattagagaaacagtttcaacaacaggaatggtgataccaagggaacataacacaacttcaacagcatcagtagatgaggagagaaaccctatttcaactttttctctatacgattatctctgctactga

SEQ ID NO: 5 - DNA, 1751 bp, Brassica napus
acacattaaaaagaaaaatatagagagaactttagaagttagagagatgaagacgcaacatttatggtgggaagttcttgatctattcttgttacaaaacaaagctcttgttccattcttgagttttatagcggttgtggttattgtcctctacttgtaccgaccttcctggtccgtactcaatgtccccggtccaaccgctatgcctcttgttggccacttgcccatgctggctaagtacggccctgacctcttctccgttcttgccaagcactatggccctatcttcagatttcagatggggaggcaaccattgatagtagttgcagaagcagagctttgcagagaagtagggataaaaaagttcaaagatattccgaacagaagtattccttctccaatctcagcctctcctcttcaccagaaaggtctcttcttcaccagggacaagagatggtctaagatgagaaacaccatcttatctctctaccagccttcacatttgacaagtcttatcccaacaatgcaaaatttcatcactcgtgctactcataaccttgactctgaaccagaagatgtcgtaatctccaatctcttcctcaagctaaccacagatatcatcggacaagctgcttttggagtggatttcggcctctcgggtaaaaaaacaattaaaaaagattcagcagatagcagcaatgtagaggttactgatttcataaaccagcatgtgtactccacaacacagctcaagatggatttgtctggctcagtctccatcatcttaggcttactgattcccttcttacaagagccgttcaggcagattttgaagagaataccaggaactatggactggagagtcgagaaggctaacacgagacttagtggacaactcaatgagattgtgtcaaagcgagccaaggagagagatactgactcaaaagatttcttgtcattgattttgaaagctagagagttggactcttttgccaagcgcatctttacccctgattatattagcgctgtgacttatgagcatcttcttgctggctctgctaccactgctttcacgttatcctctgttctctacttagtatctggtcatcttgaagttgagaaacgtctgcttcaagagattgacgagtttggaggacgtgatctgatcccaacttcccatgatttaacatacaagtttccataccttgatcaggtcatcaaagaagctatgagattctacatggtttccccattggttgcaagggaaacagcaaaagaagtggagataggaggttacctacttcccaaggggacatgggtttggttggcactaggagttctagcaaaggaccccaaaaactttccagatccagaaaagttcaagccggagagattttatcctaacggagaagaggagaaacttagacatccatatgctttcatcccgtttggcattggtccacgagcctgtgttggacaaagatttgccctgcaagagatcaaactcaccttgttgcatctctaccgtaattacatttttagacattctccagatatggagaaaccactgcagcttgattatggtgtaatcctcagcttcaagaatggtgttaagctcagagccatcaaaagattctaattctataaaactgagagcagcatgatgaaataaatgtgaaaaccgaatttttatatttaaaattgatcaaaaactccaatgtagtttcagaggaaaaaaataataatataac

SEQ ID NO: 6 - DNA, 2229 bp, Brassica napus
cagctctcttcttcttcttcactaaaatcttgaacaaattcaaaaaacaaacacttccaagatttgctttctcttctcttctctcatggctccctccaccatcactaccacactctccgacctccctgacgtcatcttatccaatatctccgccctcgtcaccgacacacgagctcgcaactccctctccctcgtctcccgcaagttcctcgccctcgagcgatcaacacgctctcacctcactctccgcggcaacgcgcgtgacctccacctcctccccggctgtttccgatccatctcccacctcgatctctccttcctctccccgtggggtcactctctcctctcctctctccccactgaccaccagaacctactcgctctccgtctccgcctctgcttcccttccctcgactccctcgccgtatactcgcgctctccgacctccctcgagcttctcctccctcaatggccgaggatccgccacgtcaagctcgtccgctggcaccagagaccttctcagatccctctgggcggcgacttcgtctcagtcttcgagcactgcggcttcctcgagtctcttgatctctccgctttctaccactggacggaagacttgcctcccgttctcctccgttacgctgacgtggcggcgaggctcattcgtttgaatctattaacggcgtcgtttaacgaaggttacaagtctagcgagatcgttgatataaccaaagcttgtcctaaccttagagacttccgtgtagcgtgcacgtttgatccacgttacttcgagttcgtcggtgacgagactctctccgccgtatccaccacctgtcctaaactaacagtcctccacatggttgacacggcggctctaacgagtcctagagctattcctgatggtggagactcagctgttacagtggggacgctagtggaagttttctcagctctaccatgtctagaggagcttgtgcttgacgtagggaagaatgtgaagcagagtggtgtggctttagaggcattaaactcgaaatgcaagaagttaagagctttgaagttaggacagtttcatagtgtttgctctgctacagagtggcggctagagggtgtagctttatgcggagggttacagtctttgtcgattaaaaactcgggggacttgactgatatgggcttggtggctatagggagaggatgttgtaagctgagtaagtttgaggttcaaggttgtgagaatgtgacggtgaagggagtaagaacaatggttactcttctgaggaagactttgactgatgttaggatctcttgctgtaagaacttagatgcaacagcttcgttgaaggcggttgaaccgatctatgatcggatcaagaaactgcatattgattgtgtttggtctagtgtagaggaggaaggaggtgtggaggagactaaccatgatgatgatgatgattatgagaggagtcggaagaggtgcaagtattcatcgggtgaatcgttgaatgggttctgttctgaagagagagtgtgggagaagctagagtatctgtctttatggatcaatgttggtgagtttctaacaccattaccaatgacaggactagatgactgtccaaacttggaagagattaggatcaagatagaaggagactgcagaggcaaacacaagccagctgagccagagctaggcctaagttgccttgctctttatccaaagctctccaagatgcaactagattgcggcgacactatcggttacgcattgactgcacctcccatgcagatggatttgagctcgtgggagagattcttcttgattggaattggtaacttgagcttgagtgagctagattattggccaccacaagatagagatgtgaaccagaggagtctttatcttccaggtgcaggtctgttacaggaatgtttaactctgaggaagcttttcatccatggaacggcttatgagcatttcatgaattttttgttgaggatccctaacttaagggatgtgcagcttagagaagactattacccagcacctgagaatgatatgagtacagagatgagagttggctcttgtagtagattcgaggaccagttgaacagccgcaacatcattgactgatactaaacactaagtaacttccacccccattattacatatgtattgacttcagcttcagttcactctaaatgttatgtttgtaaaaggaaagatcaag

SEQ ID NO: 7 - DNA, 357 bp, Brassica napus
atgagtccgtgcaaaagaaagaatgaggaggaagcagttgctgctgtttgtctgatcagtaaagccccagaaggaatctcattggacataccacaaagaaaggagaaggatgagcaggagtgttcaagagaagaaacgtccactggacttgtctcttaccaagactgtaactcatatgcagagcctccagacacatgcaagagaaagaaatatgatgaagaagaaaccgatgctgctcatgcttcttgcggaatcatcatcagtaaaaccccagaaagatctcgggagatcttaaaagaaaagacggttcaaggactcatcagcggcttctcttatggaaagagacagaacagatga

SEQ ID NO: 8 - DNA, 1725 bp, Brassica napus
atgcattttcccgcaaaaactgaaaaacactttcccgccaaaaccgcaaaatgtatttttccgcaaaaccggaaaatgcattttttcgccaaaaccgaaaaaaaaacaattttcccgcaaaaccggaaaacgcattttcccgccgaaacaaaaaaacgcattttcccgccgaaacaaaaaaaacctgtaatcaactcagcgtcgcctgtgccgaagaaagagacggtggaagatgagagacggtgtcatgttgcgtggacaagtgtacaacaagagaagtgggagggtgagcttactgtccaaggaaagatccccacttggctgaatggtacgtatctaagaaacggaccgggcctatggaacatcggagaccacgacttccgacatctcttcgacggctactccacactagtcaagctcgaattcgacgacggtcgtatattctccggccaccgtctcctcgaatccaacgcctacaaagccgccaagaaacacaagaagctctgttaccgcgaattctccgagactccaaaaccgtcgagaagcaacttcaagaaccctttctccggggtcggagagatcgtcaaactattctccggcgagtctttaacggacaacgccaacaccggagtgatccgtctcggtgacggacgtgtcatgtgcctcacggagactcaaaaaggatcgattcttgtcgaccatgatacgttagacacgatagggaagttcaaatacgacgacggtttgtgcgatcacatgatccactcggcgcatcccatcgtgacagagacggagatgtggacgttgatacctgatcttgttaagcctggttaccgggtcgtgaggatggaggccgggtcgaataaaagggaggttgtggggcgggttaaatgtcggtccgggtcgtggggacccgggtgggttcactcgtttgcggtgacggagaattatgttttgataccggaaatgcccctgaggtattcggtgaggaatctgcttagagctgagccgacgccgctttacaagtttgagtggtgtcctaacgacggagcttttgttcatgtcatgtccaaactcactggagaaatcgtggcaagcgtggaggtccctgcatacgtaacgtttcacttcataaacgcatacgaagaagatgaaaatggagacgggaaagcgacggtcatcattgcagattgttgcgaacacaacgcagatacgcggatactcgatatgctccgtctccacacattacgttcctcacatggtgacgacgtcttacccgacgctaggattggaagattcaggataccgttggatggaagcaagtacgggaaactggagacggcagtggaggcggagaagcatgggagggcgatggatatgtgcagcatcaaccctttgtatttgggtctaaagtatcgttacgtttatgcgtgtggtgctaaaagaccttgtaacttccccaatgccctcaccaaggttgatattgtggagaaggaagtgaagatctggcacgaacatggcattataccatccgagccattctttgtgcctcgtccaggcgcaacccatgaagatgatggagtggtgatatcgatagtaagtgaagaaaatggaggaagctatgcgatattgcttgatggaagctcctttgaagaaatagcaagagccaagtttccttatggtcttccttatggcttacatggttgctggatccccaagcactga

SEQ ID NO: 9 - DNA, 1674 bp, Brassica napus
atggaagatcctaccgcaagcaacgtgactcctccggcgaattcttcttctcagataatcccatcgccgtcgtcggtgaaagtgtcactcgagtcacgaatcaatcgtctgatcaatgccaaccaatcaccatcaccgtcacgttctatatactccgacagattcataccaagcagatccggatccaatttcgcgctcttcgatctcgcttctccttctccgagcaaagaagacggcgcaggctcgtacgcgactctgttgcgcgcggcgatgttcggtcccgagacgccggagaaacgggacatcactggcttctctacgtcgaggaatatcttccggtttaagacggagacgaatcggtgtttgaattctttttctcctttcgtgtccgatgatggtcctggtgttagtcatgctccgatcaaggccttgaggaaggtgtctcgatcgccctataaggtactagatgcaccggctttgcaagatgatttttatttgaatctagtggactggtctgcacaaaatgttcttgcggtgggattagggaactgcgtgtatttgtggaacgcttgtagcagcaaggtaactaaattatgtgatctgggagctgatgatagtgtttgctctgtgggttgggcctttcgtggaactcatcttgctgtcggaactagttccgggaaagtgcagatatgggatgcgtcgcgttgcaagagaacaagaacaatggaaggacatagactaagagttggagcactggcgtggggatcatctgtactgtcatctggtagtagagacaagagtattcttcagagagacatacgttgtcaagaggatcacgtcagtaaactggcaggtcacaaatcagaagtatgcggactcaagtggtcttatgacaacagagagttagcttctggtggaaacgacaatcggctttttgtatggaaccaacattcaacacaaccggttctgaaatatagtgaacacacagccgcggttaaagcaatagcttggtcacctcatgttcacgggcttcttgcttctggtggtgggactgctgatagatgcatacgtttttggaatacaactacgaatactcatttaagttccattgatacttgcagtcaggtatgcaatctagcatggtctaagaacgtaaacgagctagttagcacgcacggatactcccaaaaccaaatcatagtctggaaatacccaaccatgtccaaaattgcgactctgacaggccacacataccgtgttctgtatctagcggtctcacctgatggacagacgattgtaaccggagcaggagatgaaaccttaaggttctggaatgtcttcccatcccctaaatctcagaacacggatagtgatattgggtcgtcattctttggtagaacaacaattcgttgaaaacatctttcacatacagagagacacacaaagacagatacatgtttctttcattacttcaacagcagcagcctcttgagttggtcctctcaaccaacaatttttcacacggagtcaaaacaaattatttttatcacacgggatgcaaagaagatctaacccctttgatacaaaataccatctgggttcgtcaagagatgcgcaacaaaattttcttaaaagtgtatatctttttcttattcatacaagttttgttgaaca

SEQ ID NO: 10 - DNA, 1878 bp, Brassica napus
cttgattttgacgctctttgatctaccaaaatatccacatgtctgtgtaagtacatatcaaattgctttttcttaattaacaatatcataaagttttttttttataaataataaaatcatgctttttcctcgataatgaatgaatcgtccaaaaaagttgaagctggtgaaaggcagtttgacccctccccatctcccaacttggtacttcgctttgcacacatcacatgcttcctctcactctctctcctcttttcttctcccactcttgttcttctctctaaatgctctgtattgtgtcaagccaaaaaaggaagctttactccattaacgacgagatccttccctaattctctgatcaatagattttggtgttttagtgtctgtatggagtgtaatgcaaagccatcattgcagtgggagtgggataatctaatatcgtttggtacttcatcagctgaaattcctaaaaagcaacgaccaatggattgggaaaatgatgggtttgattgcaccactttttactcttccagcttttctacagtagcagcatatggtggtagttcaggttctgatctagctcatgctttctctaaaagctcaaagtcaacttccattagctcttcgtcagctgaagttagaacatacaatttcacatcagaagctggtgaaagtgttcctgctgggagcagtgaagagtttgcaatgggaattgatacttctccaagtcttgaactttctttcggctctggtgatccggttcttggtttgaagctcggtaagaggacatactttgaagacttttgggaagtggagaatgctaaaggttcagcagcacttccagtgagcctggcgtcatcttctgcttctccggtgaagaaatccaaacccatttctcagaaattacaaactcctcactgccaagttgaaggctgtaacctcgatctctcctcagctaaagactatcatcggaaacacaggatttgtgaaaaccattcaaagttccctaaagtcattgtgaatggcttagaacgccggttctgccaacaatgtagcaggtttcactgtctctctgagtttgatgagaagaaacgtagctgtcgccgacgtctctcagatcacaatgcaagacgtcgcaagccaaatcccgggaggacatatgatgggaagcaacatatggattttgtatggaacagatttgcacttatccatccacgaagtgaagaaaagtttctatggccaaatccgaagcctgtaccatcaagagggttattgcaggaacctgcaacgaccgagatgcccagtaagcttttcaccgagcaatgtggctttggattgttggaccccaaaacaaaaaccacgagagctgagctattcagtaaagatttgttagaaaaggtcacaatctcttcacacataagtacttctcaagatcttgatggtgctctctctcttctgtcaaattcaacaccatgggtttcctcagaccagccaagacggttttcccttaaccaccattccacaagcaacctccaacctgtggttcacgggtctgtgactcaacccaattcagtgtccagctattggcagccggatccaccagcagttgagggctcaaccgctttgcctaggaacggggaaggccagtttaatgaccactacaacttgaatcagttttacaactgaaagtgtattgcctttatatcataataagatattttgtttaaggatcaggcgagcctagtggtaactttaagataggagctgtgaaacttgctaaagacatcaattcctctcttctttcttttttatcctttgattttcttgggttagggagagttgtgacagttaagtcttataaatcatcttgtcaaatta

SEQ ID NO: 11 - DNA, 1209 bp, Brassica napus
atgatattaaatgcagtggaaaagaaaaaaagaaagataacaacatattcatcacacacaccagcccaactaaaacttttatataaacagtacctctcttactttccttctcaaccattcaaacaaagaaaaatgagtcaacacaacatcctcgaagctcttaacgtccgggtcgtgggcacgggcgatcggatcctagtcctagcccacgggttcggcacagaccaatccgcctggcacctaatcctcccttacttcacccaaacctacagagtcgtcctctacgacctcgtctgcgccggcagcgtcaaccccgactacttcgacttcaaccgctacacgaccctcgacccctacgtggacgacctcctcagcatcatcgactccctcggcatccaaacctgcgcctacgtgggccactccgtctccgccatgatcggaatcatcgcctccatccgccgcccggagcttttcacgaagctcatcctcatcggagcctcgccgaggttcctcaacgacgaggactaccacggcgggttcgaggaaggggagatcgagaaggttttctcggccatggaggctaactacgaggcctgggttcagggatacgcgccgttggcggttggagccgatgtgcccgaggcggttagagagtttagccggacgctgttcaacatgcgtccggacatctctctgttcgtctccaggacggtgttcaatagtgatctcagaggcgttcttgggttagtgagagtgccttcttgtgtgattcagacggcgaaggatgtttctgttccggcttcggtggcggagtatctccgtgctcatctcggtggggatacgacggtggagacgctgaagactgaaggtcatttgccgcatctcagtgctccggctcagctagctcagtttctccggcgtgcacttcctcggtgactttaatttttcattttcttttaatagataaaaataataattggaggaatatggttttgtggggtccacgtggacaacggagggtctctattggtggaggacagtatggtactgtcaaaatctagagataagattgttcacttgacacgtgttgaacgcattattacttcactttttttgagtgttttgaattttggtttagtttaatcacgagtttaaataaaataatactgctaattgtcagtggattttgcggaatcactaaataaaaaa

SEQ ID NO: 12 - DNA, 980 bp, Brassica napus
atgaacactaagttatcactttctcagaccaagatcattggtttcacaatccggctcaacgatacacgcactcgctatggacgttcaagcatttccgcaactctcagctcaaagccagcctactctggagaactcaaggttgtaaaagagacatcaggaacggaactattgaaaaagaagaatgcaagcaatgaagacaacttcttgtcgaaaattgccattaattatctatcaaagactcttcaagacactgcagggatgagtagtagtagcagcaagagtactggttatgatagcttagtggacacggcaactagggttgcgggtaacttagacatcaagcaacagcatgagcttgttcttgttgctttggacagagcatttccagcagtgatactctccttgatcaaaatgcttttaccaccttcgaaactatcgagagagatgttcgcgctattcaccacagtgtttttcgcgtggcttgttggaccttcagaggtgagggagactgaggttaatggaaagaaagagaagagcatggtgttcataaagaagtgcaggtttcttgagcagactaattgtgttggtatgtgcactcacctttgtaaaatcccatcacaaatcttcataaaaaactcacttggaatgcctatctacatgatgcccgattttgatgatcttagctgtaagatgatgtttggtcaggagcctccagagatcaaagatgatcctgtaatgaaacagccatgctttcaattctgcaaatcaaacagaagctatggtgtgaagcactagagctcatacaagggacattaaacatgattgtaatatcaaaacatatagtatttaagtttatcttgtaaagataaatcagagattacaattacttatagaagcaaacctcatgccctatggtattgaaccaagaacagaacaaaacatgtaaatgtttgaattttcaaaaagagtaagacaataag

SEQ ID NO: 13 - DNA, 2007 bp, Brassica napus
atgatgatcaaaatgtctctccctctcccgccgaaaatatttcttccaccgtcaaattctccaccgactcatcatcaccaagctccaccaccgcttgcaccgccacgtgctgccatatcaatagctatcccggaaaccggtttaggacgtaccggtaccatccacgaagagtccacgtcttcagcttttcgtgactaccagtctttattcttgtcacaacgttccgagacagtcgaacctgtcgtaattaaaccgatagaaggctcgataccggttgattttccttccggtacatattacttagccggtccaggactttttgaagacgaccatgggtcaacggtgcatcccctagacggtcacggctatctacgtgcttttcacatagacggaagtaaacggaaagcaacgttcacggcgaagtacgttaagacagaagctaaacaagaagagcatgaccccgttactgacacgtggcggtttactcacagaggccctttctcggtgttaaaaggtgggaaacgatttggaaacacgaaagtgatgaaaaatgtggcgaatactagcgttttgaaatgggctgggcggttgctttgtttatgggaaggtggtgaaccgtatgagattgaatctggttcgttggataccgtcgggagatttaacgtcgcgatcaacggctgtgatgatgattccgacagagatgttgctggtcatgatatatgggacacagccgcagggttgttgaaacccatacttcaaggtgtgtttaagatgccgccaaaacggttcttgtcacattacaaaatcgacgatcgaagaaatagacttttaacggtgacttgcaacgctgaggatatgctcttacctcgtagcaacttcacattttgtgagtatgattcggaattcaagttgatacaaacaagagaattcaagatcgatgatcatatgatgattcatgattgggccgtcacagatactcactacgtactctttgccaacagagtcaagcttaatctaattggttccatggcggctatgtttgggatgtcacctatggtatcagcgttaacgttgaacccaagcaacgagagttcccctatttatctcctcccaagattttccgagaaatctatgggaggtagagactggagggtacctgtggaagtgtcttcacagttatggctgatacactccggaaacgcttatgagactagagaggacaacggtgatttaaagattcaaatacaagcttccgcatgctcataccgttggtttgattttcagaaaatgtttggatatgattggcaaagcagcaagctggatccttctgttatgaatctgaaccgcggagatgacaaactactccctcatctagttaaggtgtctatgaccttggacgcaatcggaaactgcaagagctgtgacgtggagcctttaaacggttggaacaaaccgtcagattttccggttatcaactcatcatggtcaggagaaaagaacaaatacatgtattgtgcatcctcttcgggaactcgacgtgaacttcctcatttccctttcgatatggtcgtgaagttcgacctagactcgaatactgtccgtacttggtctaccggagctcggagattcgttggtgaacccatgtttgtccctaagagctcaagcgaaggagaagaagacgatggttacattatcgtcgtcgagtatgcggtttcggtggagagatgtttccttgtgattttggatgctaagaagatcggtgagtccgatgcggtcgtgacgagattagcggtcccgaggaatttaacgtttccaatggggtttcacggtataattgttggaaacgatcaagagggtgacgattcagtgcctttgaacaacatgtttggctattccacttctctccgctccatgacacagggaaaaggagagttcgcgacggaatacaaagaacacagtgatgtgtctaacgaagtccaggctcagctcgtcaacgccgacaactga

SEQ ID NO: 14 - DNA, 1710 bp, Brassica napus
atggcttcgttgatcacagccaaagcaattatgatgagtcatcatcatgttttgtcctcaactagaatcactacactttgttccgacaaagccaacgacaaccaacaaagaaaaacaaaactccatatctctcaccgatttttctcccgccgaacaatatctgcagctgtaatcaactcagcgtcgcctgtgccgaagaaagagacggtggaagatgagagacggtgtcatgttgcgtggacaagtgtacaacaagagaagtgggagggtgagcttactgtccaaggaaagatccccacttggctgaatggtacgtatctaagaaacggaccgggcctatggaacattggagatcacgacttccgacatctcttcgacggctactccacactagtcaagctggaattcgatgacggtcgtatcttctccggccaccgtctcctcgaatccgacgcctaccaagccgccaagaaacacaagaagctctgttaccgcgaattctccgagacaccaaaaccgtcgagaagcaacttcaagaaccctttctccggggttggagagatcgtcaaactattctccggcgagtctttgacggacaacgccaacaccggagtgatccgtctcggtgacggacgtgtcatgtgtctcacggagactcaaaaaggatcgattcttgtcgaccatgatacgttagagactatagggaagttcaaatacgacgacgggttgtgcgatcacatgatccactcggcgcatcccatcgtgacggagacggagatgtggacgttgatacctgatcttgttaagcctggttaccgggtcgtgaggatggaggcagggtcgaataaaagggaggttgtgggccgggttaagtgtcggtccgggtcgtggggacccgggtgggttcactcgtttgcggtaacggagaattatgttttgataccggaaatgcccctgaggtattcggtgaggaatttgcttagagctgagccgacggcgctttacaagtttgagtggtgtcctaacgacggagcttttgttcatgtcatgtccaaactcactggagaaatcgtggcaagcgtggaggtacctgcatacgtaacgtttcacttcataaacgcatacgaagaagatgaaactggggaaggaaaagcgacggtcatcattgcagattgttgcgaacacaacgcagatacgcggatactcgatatgctccgtctccacacattacgttcctcacatggtgacgacgtcttacccgacgctaggttgattgggagattcaggataccgttggatggaagcaagtacgggaaactggagacggcagtggaggcggagaagcatgggagggcgatggatatgtgcagcatcaaccctttgtatttgggtctaaagtatcgttacgtttatgcgtgtggtgctaaacgaccttgtaacttccccaatgctctcaccaaggttgatattgtggagaagaaagtgaagatctggcacgaacatggcattataccatccgagccattctttgtgcctcgtccaggcgcaacccatgaagatgatggagtggtgatatcgatagtaagtgaagaaaatggaggcagctatgcgatattgcttgatggaagctcctttgaagaaatagcaagagccaagtttccttatggtcttccttatggcttacatggttgctggatccccaagcactga

SEQ ID NO: 15 - DNA, 726 bp, Glycine max
atggagcacactccaagaaagagatccagcaagagagaccgccacagcaagatcaacaccgcgagaggcctcagggatcgaagaatgaggctgtccctcgaagtcgcgaagcggtttttcgggttgcaagacatgctaggctttgacaaggccagcaaaaccgtggagtggttactgaaccaagcaaagggtgaaatcaaacaacttgcaagggaaaaaacaagtgttgttggtggtggtggcaagagtgcatcatcaacttcggaatgcgaaggggagcaagagagggagacagtaccaaacatgatgaagagaagaaaaagtaaggtttgtagaaagagtgcattcaatgctattgataaggaatcgagggaaaaggcaagagaaagggcaagggaaagaacaagagagaagatgagaactcggagagtacttgtttctgatgcatcaaacctgaaccactctgcgggtactacacatcatccctccttggatgtgcaccttcatgaggctgatcaagaaccaattagttctcacaacgtgaaggagcataatttgggagaggacatggcgcatgaagataattctttggcgctcatgaacaagtggagcccaactatgttgttcaattctcttcacaactcaggaatccttcaggaaaccctcgagttatataaatatgcatgtggttgctttaaacactatcatgttggtctgattcactga

SEQ ID NO: 16 - DNA, 741 bp, Glycine max
agatcacaactttttgctcaaaagaaaacgattaggaaaaaggatgccccttgctcaattgcgatggagcacactccaagaaagagatccagcaagagagatcgccacagcaagatcaacaccgcacggggcctcagagatcgaagaatgaggttgtccctcgaagtcgcgaagcggttttttgggttgcaagacatgctaggctttgacaaggccagcaaaaccgtggattggttactaaaccaagcaaagggtgaaatcaaacaacttggaagggaaaaaacaagtgttggtggtgcgaagagtgcatcatcaacttcggaatgcgaaggggagcaagagagggagacagtaccaaacatgaagagaagaacaaacaaggtttgtagaaagagtgcattcaatcctattgataaggaatcgagggaaaaggcaagagaaagggcaagagaaagaacaagagagaagatgagaactcggagagtacttgctgatgcatcaaacctgaaccactctgcgggtactactcatcaaagccaaagcgtgaaccatccctccttggatgtgcaccttcctgaggctgatcaagaaccaagttctcacaacgcgaaggagcattggggagagaacatggcgcatgaagataattctttggcgatcatgaacaagagtccttcaggaatgcgtgctggcaagacccttgagttatataaatatatgcatggttggtttaaacactag

SEQ ID NO: 17 - DNA, 568 bp, Glycine max
aagaagccacctaagaaagacaggcacagcaagatttacacctctcagggcttgagggaccgaagggtgaggttgtccattgagattgctcgcaagttctttgatcttcaagacatgctagggtttgacaaagccagcaacacccttgagtggctcttcaacaagtccaagagagcaattaaggagcttgcaaggagcaagcacagcaacaacaacagtgataacaagtcaccaacaacattgatggctgcaaaggagaggatgaagttgaagaggacacagaaggaacctgcaaagatgaaggagtcaagggagaaagcaagagcaagagcaagggaaaggactagtaacaagattattatgtgcaatgttaacaccaacaacacaggagggaaggtgctacaagacttgaagaaaaagtgccctgcaattgaaaacaaccacactcaaattatgcatcaatcaagaaagttgaaaccatctttgatgtcctcttctgatcatcatcatcatcatcaccaaaaccttgtgatgcctaaggaaccaccaagcttcaacaacaacaaca

SEQ ID NO: 18 - DNA, 1817 bp, Glycine max
atggtggtgttcatggattatttggaatggttgtttgcaattccaagtgtcccttctgcttcagcaatgttcaccctgcttgctttaattggaggattgttggtttatctgtatgcaccctattgggggttaaggaaggttccagggccaccatctctgccccttgtaggacaccttcccttgctggcaaagtatggtcctgatgtgttctcagtcctcgccaagcaatatggtcctatttacagattccatatgggaagacagccactaataattatagcagatgcagagctttgtaaggaggctggaataaaaaaattcaaagacatttcaaacagaagtattccctcaccaatttctgcttcccctcttcaccaaaagggcctcttcttcagccgggattcacaatggtctaccatgcgaaacactatattatcaatgtaccagccatcatacttgtccagattagtgccaacaatgcagtccttcatagaatctgcgactcaaaaccttgactctcaaaaagaagacataattttctccaacctgtccctaagactagcaactgatgtgattggacatgcagcatttggtgtcaactttggcctttctaggccacattcagtttgtgattccatcaagatatcagatttcatcgaccaacacatatactccacaacacagctaaagatggacttgtctggttccttgtccattatcttgggtctgcttttgccaatacttcaggagccatttaggcagattctgaagagaattcctggcaccatggactggaagattgagcgtaccaaccagaaactaagtggccgtcttgatgagattgtggagaagagaatgaaagacaaggcacgaagttcgaaggatttcttgtcactcatacttaatgccagagaaacaaaagctgtttcagagaatgtgttcacacctgactacataagtgctgttacttacgagcacctacttgctggctccgcaaccacttcctttaccttgtcttctgttgtctatttggttgctggacaccctgaagttgagaaaaagttgcttcatgagattgatgggtttggtccagtggatcagatacccacttctcaagatcttcataacaagtttccttatcttgatcaggtgatcaaagaggccatgaggttttacactgtctctcccttagttgcaagagaaacatcaaatgaagtagagattggaggctatctccttccaaaggggacttgggtctggttagcgcttggagttccagcaaaagaccccaaaaactttccagagccagaaaagttcaaaccagataggtttgaccccaactgtgaagaaatgaaacgaaggcatccttatgcttttataccatttggaattggtcctcgggcttgcattggtaaacaattttccctacaagagatcaagatttctctgattcatttatatcgaaaatacttgtttcggcattctcccaatatggaaaaccccttagaactccagtatgggatagtcctcaacttcaagcatggggtcaagctcagagtcataaaaagaacagagacttgctaagtaaacggttcagacatggcttatactagtacagagttcagaagatgaattataagatggagtgtgctaaaatccaataatgaaaaattgtaatgttacgcagaatcagccaataagtgtttaaaataataaggtcaaagagtgtgtttgcatttcccaaatatagaattgtaagtttataagagtaagagacactcttcctacaagattatgaatgacattatcatttgtgg

SEQ ID NO: 19 - DNA, 2106 bp, Glycine max
gtgttcgcggcggtttccgacacccgcacgcggaacgcgttgtcgttggtatcgtggagcttctaccggttggagcgcaagacgcgcacatctctcacgctccgcggcaacgcgcgtgacctccacctcatcccgacctccttcaagcacgtcacgcacctcgacctctccttcctctcgccgtggggccacgcgctcttctgctcctcctcctcctccgccgccgccgccgccgtcgaccaccagcgacacctcgcgcaacatctccgcgccgcgttcccgcgcgtcacctcactcgccgtctacgcgcgtgacccggacactctccgcctcctcctcctctccccatggccggagctctccgccgtcaagctcgtccggtggcaccagcgcccgccgacctccgcgaacgaagccgacttcgctgagctcttcaagaagtgccgatcgctcgcctccctcgacctctcctcctactaccactggacggaggacatcccgacggtgctcgccgcaaaccctatctccgccgcctttctccgccgcctcaacctcctaacaacctccttaacagaaggattcaagtctcacgaaatcgaatcgatcaccgcgtcgtgccctaacctggagcactttctcgcggtctgcaacttcgatcggagatatatagggtccgtcagcgacgacacgctggtttctattgcttccaattgcccaaagctatcgttgcttcacttggccgatacgtcgtcgttttcaagtcgcagagaggaggacgagggtttcgacggagaagacgctagcattagccgcgctgctcttatgactttgttctctggacttcctcttttggaagagctcgtgttagatgtttgtaaaaatgtcagagagagtagtttcgcttttgaagtggtgggttcaaagtgccctaatttgagggttctaaaattgggacagtttcaagggatttgcttggcctttgagtctcggcttgacggaattgccctttgccacgggcttcaatcgttgtctgttggtaactgcgcggaccttgatgacatggggttaattgagattgccagggggtgttcgagactggttagatttgagcttcagggttgcaggcttgtgacggagcgtggactgaggaccatggcttgtttgcttggcaggactctgattgatgtcagggtttcttgctgcgtaaaccttgacacagctgcgactctcagggctttggagccaattcgcgagcagattgagcggctccatgtggattgtgtgtggaatgggttgaaggagagtgatggcctgggacatgggtttcttagttttgatttgaatggtttggatgaacaggatgatgtgggtaaactcatggattactactttgggggtggagaatgtgagaacacaagcaaaaggaagaggcagagatgcgagtatcaaatgagggttcatgattcctttttggaaagcaatggcaatggtttctatggcaagagctgggacaagctgcagtatctttctctctggataaaagttggtgatctcttgactccattgccggtggcagggttggaagattgtcccgtcttggaagagattcggattaaggttgaaggagattgtagggggcagccaaagccagcagagagcgaatttggtctcagcattctggcttgttatcctcagctattgaagatgcagctggactgtggtgatactaaaggttatgctctcacggcaccctctgggcaaatggatttgagcctgtgggagaggtttcttctgaatggcattggcagtttgagtctcagtgagcttcattactggccaccacaagatgaggatgtgaaccagaggagtgtgtcacttccagctgctggcttgctacaagaatgttacactttgagaaagctcttcattcacggaacagcacatgaacatttcatgaacttttttcttaagatacaaaaccttagggatgtacagctgagagaagattattatccagctcctgaaaatgacatgagtacagagatgagggtaggttcgtgcagccgctttgaagatgcactgaataggcgtcgaatatgtgattga

SEQ ID NO: 20 - DNA, 1857 bp, Glycine max
atgcaagccaaacccattcacaacaccccaacatacattcctccacccataaggccatcaccaccggtgcaccaaacccctccctctataccatcaatcaaacctcgtgcaatatccatatccgcacctaatattcctattgccgtaccaattccaccaattgtagagcctgatgattccaatgctgcttattatgactaccaattcttgttcatgtcacaaagatccgaagcaacccgacccgtcactctaagcaccgtggaaggtgcgatccccgccgatttcccgtctggcacgtactatctaaccggaccagggcttctggccgacgatcacgggtccacggtgcaccctctagacggccatgggtacctaagggcatttacttttgataataatgttactaagaatgtcaagtacatggctaagtacattaagacggatgcacatgtggaggaacatgaccctaagaccaacaagtggaaattcactcatagaggcccattttcagtgttgaagggtggaaaaaaagttgggaacactaaggtcatgaaaaatgtggctaacactagtgttctaaagtggggggaaaagctcttgtgtatgtgggagggtggggaaccgtatgagatccaagccggtacgttagatacgattggacagtacaacatgatggatggtgctgatatggaaaatcatgatcagagcaaaggtggtggtggtggtgatgtttgggaggttgctgccaacctattgaagcctatattatatggagtgtttaagatgcccccaaggagactcttgtctcactataaggtcgattctagaagaaacaggctactcactgtgtcatgcaatgcagaagacatgttgcttccacgcagtaattttacattttccgaatatgactcaaattttaatgtagtacagaagcaagttttcagaatcccagatcacttgatgatccatgattgggcattcacggatacccactacatagtatttgccaatcgcataaaacttgatgtactgggatcaatggcagcagtgtatggcatgtctccaatgatatcagcattgagggtaaacccaagtaagagcacatcccccatttacctgattcctaggtttccaggaaaaaataatggcaaagagagagattggagagtaccagttgaagcaccttcacagttgtggttgctccatgttggcaatgcctttgaagttagacaccctcatgggaatttggacataaaaatacaagctgctgcttgctcttaccagtggttcaatttcagcaagttatttgggtacgactggcaaaagaagaagctagacccatcaataatgaatgtaaaaggtggaagtaagttattgcctcatcttgttcaggtgtctataaaactagattctgactacaattgccaagaatgtgatgtgaaacccatgaagaaatggaagaaatcctcagattttcctgctacaaatccaacgttttctggcaagaagaacaaatatctctatgcagcaacaaccttaggatctcgcaaaacattgccatgtttccctttcgataccgttgtgaaattagacctagagactactgaatctgttgcacaaacttggactgctggaagtagaagatttattggtgaacctatttttgttcccaaaggttaccaagaagatgatggctatcttcttgttgttgagtatgctgtttcaatgaatagatgttaccttgtcatcttggacccaaaaaggataggagcagataatgcccttgttgcgagaatcgaaattccaagccacttaaattttcctctaggttttcatggtttctgggcagctaattag

SEQ ID NO: 21 - DNA, 1765 bp, Glycine max
atgcttgttcctgacatgcctcataacaatatttctcttcgaaataaaggcttcatctacaaagggcaacacggtattaatctccgagacttcaccaaggcaaatgttgcaagtccatcattacctgtgattgccccaccaacaccggaggaacggaaagaaaccaccgccgacgaccgccatcaccaccaccaccacgttgcatggactagtatcccgcaagagaggtgggaaggagagttacaagttcaaggaaaaattccattatggctgaaaggaacgtacctaaggaatggtccgggcatgtggcacatagaggactacaacttccggcacctcttcgatggttacgccacgctggtgaggctcggtttccagaacgggcggttagtcgccgggcaccggcagattgagtcggaggcgtaccgggcggcgaagaagaacaagaaaatatgttaccgagagttctccgaggtgcctaaggcggcgaatttcctggcctacgtgggggagctggcgagcctgttctccggcgcgtcgttgaccgacaacgcgaacaccggcgtggtgaagctcggtgacggcagggtggtttgcctgacggagactcagaaagggtccatagtgataaaccctgagacgctggagacagtggggaagtttgagtacagtgactcattggggggtcttattcactctgcacaccccattgtgacggataacgagtttttgacgttgttgcctgatttggtgagagcagggtaccttgtggtgaggatggagcctggcaccaatgagagaagggtcattggaagggtcaactgtaggggtggtcctgcacctggttgggtccattcttttcctgttactgaacactatgttattgtgcctgaaatgccgttgaggtattgtgctcagaatttgctcaaggctgagcctactcccttgtacaagtttgagtggcaccctgagtccaaagcttttatgcatgccatgtgcaagactagtgggaaaattgtggcaagtgtggaagtgcctctgtttgttactttccatttcataaatgcgtatgaggagcaagatgaagatgggagggtgacggcgattattgccgactgttgtgagcataattccgatactaccattcttgataggcttaggttacagaaccttcgttcatttaatggtgaagatgttctacctgatgctagggttggtcggttcagaataccactggatggaagtccatatggaacactagaggcagcattggagccaaatgaacatgggagaggcatggacatgtgcagcataaaccctaattatttagggaagaaatatagatacgcatatgcttgtggagcacagcgaccttgtaactttcccaacaccctcaccaagcttgattttgaattgaagaaggctaagaactggcatgaagaaggtgctgtgccctcagaacccttctttgtggcacgaccaggagcaacagaggaagatgatggcgtggtaatctcaattgtcagtgagaaaaatggagaaggatatgcgttgctgttagatggttccacctttgaagagattgctagggccaaattcccctatggacttccatatgggttgcatggatgctgggttccaaaagagtagcgaactctattctatcactcaagattgtgttgtcatatatatgaaatctgctttgaaaaaacgacgcaacactgcttggaagcactacacctatagaatatactctttttttttt

SEQ ID NO: 22 - DNA, 1837 bp, Glycine max
actatgttcactttcactctctctcacacacagtcacaacacacttgaacacaacacacacactacatgatgcatcattagttaaacgttgtctacctcaatcactctttaataaacacaaagtatttctcaaattaattaagtattgttggttttttgcttgcagggagaaagaaagcaaaatctaaaacgcaatgaaaagggtgaaatagatcgatgatgatgatgctgttgttcaatagtaggtggagggtgaagggaagaagtggtattacacgtcgttctcaatctttttcttaatagttctataatatctataaccttgcacctccaacaagagtgttgtattagtaaagtagggttatttggtgcaataataatatgcaatctcaaagttcagatacgtttccctctcacaatcgcaatgacccaatttcctattatgacccagcattttactactacaatagcagaccctttttcattgactctgaaagcaacccaacatcaaaacaagaaaacaataacaacaactgtgaccttgttccttctcctcctcctcctttgtcctttttccactttccttctccaacctttgaagatactcaaaatcaaattttcctcgaacaacgccacgattttctccttcagttttaccatcaacctctgcctcaagaccccgagcctcaacctgttattaccaccatggatctttctgttaaaaagagtgatcagatccaaagaaaaagagtacctggcaagagagataggcacagcaagatcaacactgcaagagggttgagagatcggagaatgagactttcccttgaagttgcaaagaggttttttggccttcaagatatgctgaactttgacaaagcaagcaagactgtggagtggttactgaaccaagcaaaagttgaaatcaatcgactagtgaaagagaaacagaagcagcagcagcagaagaagaaggaggagaatgatcatcattattatcaaagttgtagcagtgctagttcggaatgtgatcaagaaggtgtgtcttgtcttgatgaggttgtggtgagtggagatcaagaacaacaacaagagagggtcgaaaaagttgtgaagagaaaggtcaaaaactctagaaaaatcagtgcatttgaccctcttgcaaaagagtgtagggaaagggcaagagaaagggcaagagagagaacaagagaaaagatgagaaatcgtggagtgctagctgaagaatcaaagcaatgtggagaggaaacaaatcaggatctgatccaattgggttcttggaacccctttgaaacaggagatcaagaatctgcaggtgccaagagaactactactcacagtgttgctgagcatccttcttccttggacgtgattactattgaggctaaagaacaaagctaccacgcagcaaaggagcatgatgatgatgatgacgattctttggttgttttgagcaaatggagcccctccttgattttcaataactatggattctctcaagatcaccaatttgcagaatttcagtccttgggaaagctgtgggaggcctaaaacaatcacatctttgatgcgccgacagaaatgcgcaagcctgctatgtatttgtttactttcctttcagaaatttaacggagtaaggtaccttccagttctacgaatctggtaaaaactcaatatataaaacggttgtatttttttttttatctttataacacgtttccttttccatgtttctgctctgatcctggccacctaattactactcagtgacatatatggtacaaattcaatagtatctataacggtctcttatgca

SEQ ID NO: 23 - DNA, 1606 bp, Glycine max
tgtctacaataaattgcccttctcggattctttatctcttacaccacaccacatcacatctagctatctttctttactgctcactcagggagaaagaaagaaagtaaaatctaaaacgcaatgaaaaggctgaaatagatcgatgatatatgctgttgttcaatagtagagggagggtgaataagtgaagtactacacatcgttctcaatctttttcttaatagtcctataatatctataactctgcacctccaacgagggtagtagtaaagtagggttatatttggtgcaataatatgcaatctcaaagttcagatacgtttccctctcacaatggcaatgacccaatttcctgttatgacccagcattttactactacaatagcaggcccttttctcccattgactctgaaagcaacccaacatcaaaacaagacaacaacaacaactgtgacctcgttccttctcctactcctttgtcctttttccactttccttcttctccctttgaagacactcaaaatcaaattttgctcgaacaacaccacgattttctccttcagtttcaccatcaatctctccccaaagaccccgtgcctcaaccggcagttatcaccaccatggatccttttgttaaaaagagtgaccagatccaaagaaaaagacctggcaagagagacaggcacagcaagatcaacaccgcaagagggttgagggatcggagaatgagactttcccttgaagttgcaaagaggtttttcggccttcaagatatgctgaactttgacaaagcaagcaagaccgtggagtggttattgaaccaagcaaaagtagaaatcaaccgtttagtgaaagagaagaagaagaatgatcatcatcatcaaagttgtagcagtgctagttcggaatgtgaagaaggtgtgtctagtcttgatgaggttgtagtaagtcgagatcaagaacaacaacaacaacaacaacaagagaaggtggaaaaagttgtaaagagaagggtcaaaaactctagaaagatcagtgcatttgaccctcttgcaaaagagtgtagggaaagggcaagggaaagagcaagagagaggacaagagaaaagatgagaagccgtggagttctagctgaagaatcaaagcaatgtggagaggaaacaaatcaggatctgatccaattgggttcttcgaacccctttgaaaccggagatcaagaatctggtgccaagacaagtcacagtgttgatgtgcatccttcttccttggacgtgattgctactgaggctaaagaacaaagctaccgtgcagtaaaggagcataatgatgatgatgatgattctttggttgttttgagcaaatggagcccctccttgattttcaataactctggattctctcaagatcaccaatttgcagaatttcagtccttaggaaagccgtgggagacctaaaacaatcacatctttgatgtgacaacagaaatgcgcgagcctgatatgtatttgtttactttcctttcagaaatttaacggagtaaggtactttccacttctacgaatctggtaaaaaatcaatatataaaacggttctattttcatctcta

SEQ ID NO: 24 - DNA, 1599 bp, Glycine max
ttagttaaaccctgtctacctcaatcactctctactaaacacaaagtatatctcaaattaattgttggattttgtttgcagggagaaagaaagaaagtaaaatctaaaacgcaatgaaaaggctgaaatagatcgatgatatatgctgttgttcaatagtagagggagggtgaataagtgaagtactacacatcgttctcaatctttttcttaatagtcctataatatctataactctgcacctccaacgagggtagtagtaaagtagggttatatttggtgcaataatatgcaatctcaaagttcagatacgtttccctctcacaatggcaatgacccaatttcctgttatgacccagcattttactactacaatagcaggcccttttctcccattgactctgaaagcaacccaacatcaaaacaagacaacaacaacaactgtgacctcgttccttctcctactcctttgtcctttttccactttccttcttctccctttgaagacactcaaaatcaaattttgctcgaacaacaccacgattttctccttcagtttcaccatcaatctctccccaaagaccccgtgcctcaaccggcagttatcaccaccatggatccttttgttaaaaagagtgaccagatccaaagaaaaagacctggcaagagagacaggcacagcaagatcaacaccgcaagagggttgagggatcggagaatgagactttcccttgaagttgcaaagaggtttttcggccttcaagatatgctgaactttgacaaagcaagcaagaccgtggagtggttattgaaccaagcaaaagtagaaatcaaccgtttagtgaaagagaagaagaagaatgatcatcatcatcaaagttgtagcagtgctagttcggaatgtgaagaaggtgtgtctagtcttgatgaggttgtagtaagtcgagatcaagaacaacaacaacaacaacaacaagagaaggtggaaaaagttgtaaagagaagggtcaaaaactctagaaagatcagtgcatttgaccctcttgcaaaagagtgtagggaaagggcaagggaaagagcaagagagaggacaagagaaaagatgagaagccgtggagttctagctgaagaatcaaagcaatgtggagaggaaacaaatcaggatctgatccaattgggttcttcgaacccctttgaaaccggagatcaagaatctggtgccaagacaagtcacagtgttgatgtgcatccttcttccttggacgtgattgctactgaggctaaagaacaaagctaccgtgcagtaaaggagcataatgatgatgatgatgattctttggttgttttgagcaaatggagcccctccttgattttcaataactctggattctctcaagatcaccaatttgcagaatttcagtccttaggaaagccgtgggagacctaaaacaatcacatctttgatgtgacaacagaaatgcgcgagcctgatatgtatttgtttactttcctttcagaaatttaacggagtaaggtactttccacttctacgaatctggtaaaaaatcaatatataaaacggttctattttcatctcta

SEQ ID NO: 25 - DNA, 1692 bp, Glycine max
caataaattgctcttgttgggtcctttgtctctcacattatctttagtactcactcactcactactctccctctccttcacttcagcagttcaccctctcataattcaaccctcatgcttataagggaacaggcaaaacaaaaatgaacggatggaaaaggatagaattaatagctactctttctttttcaatagggagatagatagagctagcaaacatgtcgttctcaggcattgaaagtcccaaccaataaccagtgtttttccatattcttcaagggtagggttatttttttttggtgcagtcgtagtcccaacaagcttaatattaattctttccagatatgtattcctcaaataccttcctcaacggcaatgacctaatctcgtaccctaaccaaccattttgctttaggcctttttcctttgaaagcaacccaacttataatttttcaaaagaagaagccaattccaattacgcccttcctcctcctccacctcctcctcctttgtcctttttccaatctccctttgacgaaaatatcttcctagaacaccaccaccatgacttgctcctacttcatcagtactctctgactgactctggagtatcaaaaaaccttgaagttgtggccgaaatctcgccaattccttgccctgaacaaggtggaattgcgatggagcacactccaagaaagagatccagcaagagagaccgccacagcaagatcaacaccgcgagaggcctcagggatcgaagaatgaggctgtccctcgaagtcgcgaagcggtttttcgggttgcaagacatgctaggctttgacaaggccagcaaaaccgtggagtggttactgaaccaagcaaagggtgaaatcaaacaacttgcaagggaaaaaacaagtgttgttggtggtggtggcaagagtgcatcatcaacttcggaatgcgaaggggtgtctagcttggacgaggttgcagtgagtactggaggagttaataacgaggagcaagagagggagacagtaccaaacatgatgaagagaagaaaaagtaaggtttgtagaaagagtgcattcaatgctattgataaggaatcgagggaaaaggcaagagaaagggcaagggaaagaacaagagagaagatgagaactcggagagtacttgtttctgatgcatcaaacctgaaccgtttgagttcttggaacccctttgaaacggttgaagactctgcgggtactacacatcatccctccttggatgtgcaccttcatgaggctgatcaagaaccaattagttctcacaacgtgaaggagcataatttgggagaggacatggcgcatgaagataattctttggcgctcatgaacaagtggagcccaactatgttgttcaattctcttcacaactcaggaatccttcaggaacatcaattcgcagaatttcagtccttggggaaacaatgggaagcctacagcaatcaaatctgatatttgtgctcatcatcgattgcacccatcatgtttttgtgtcagcagaataaaaatacaattaatcatgctgtgtatttctttactttccttttggcatgtaatgtggtaaggtatcttccgtttaccagcatatgggaaacaatatttcgtgaatgctttgtatgtcatctccatatataaaattttacttccttctttttta

SEQ ID NO: 26 - DNA, 2035 bp, Glycine max
attcggtcagctggtggagccagagtgagcacgataagcaaggcttccatcgccatttatatatattaaaacttcaaataaagtaaaacaaacagaaaaaacagctgcaacttttttacagggtttttttcccgggaaaataataacagcctctgccgcagttcgttcgttctttctcagatctcaccaccggaaccgccatggaggactcgtccggccacctgaatattcctccggccgccgcggcggcgactctccggcacgttgaccgcatgatcaactccaaccactacacctcgccttccagaacaatctactccgaccgcttcattcccagcagatctgcctcgaaattcgcgctcttcgacatcgcctggcctcccgggggcggcgacgacagctccagcgcctacaccacgctcctccgcaccgcgctcttcggccccgacatcgagccgccgcactcgccggcgatgactctccccagccggaatatcttccgttacaaaaccgagacgcgccagtccatgcactcgcactcgccgttcttgtgcgacgattcggtccccggcgttgtccacggcccggtcaaggctccgaggaaggttccgaggtcgccttttaaggttctggatgcgcctgcgctgcaagatgatttttacctgaatcttgtggattggtcttcgcataatgtgttggctgttggtctgggaaactgtgtttatctctggaatgcttgtagcagcaaggttactaaattatgtgacttggggattgatgacctcgtttgttcggttggctgggctcagcgtggtacacaccttgctgttggaactagcaatggtaaagttcagatttgggatgcatctcgatgcaagaagataagatctatggagggtcatcggttacgggttgggaccttggcttggagttcatctcttttgtcttctggcggcagggataagaatatttatcaaagagatatccgtgcacaagaagattttgtcagtaaattgtcagggcacaaatcagaggtttgtggactgaagtggtcttatgataaccgtgagttggcatctggaggaaatgacaacagattgtttgtttggaatcaacactcaactcagcctgtcctgaagtactgtgagcatacagcagctgttaaagctattgcatggtctcctcatcttcacggacttcttgcatctgggggaggaactgcagaccgatgcatacgtttctggaatacaaccacaaactcacatttaagctgcatggacacgggaagtcaggtttgcaatcttgtctggtccaaaaatgtcaatgaactagtaagcacgcatggctattcccagaaccagataattgtttggagatacccctccatgtcaaagttggccactcttacgggtcatacctacagagttctttatcttgccatttctccggatggacagactattgtaactggagctggtgatgaaacacttaggttctggaacgtattcccttcccctaaatcacagaatactgatagtgaaatcggagcatcatcttttggaagaacaattattaggtgattgctcctggcattttgattcaatcaatgtggcatatttcaaagtttgggttgctgtgcagaaagagcagaaagaaatatcagagtagagagcaccatggtgaaaaaacttatcatgtgaaaaaataacataacaatggcatgctttaccgattagagagcattgcagggagctaagaaagttacatgatggctgccaaagacgtagacattcatgcgattcgtgtggagtctcatttcttatttacaacaaggtcattttattttattgtccgtcggagatttatacatgttaatggagttgtagctctccttcgattcttttcttttttacaatagttctctccgatgttatatattcaagatgagtatacagagaacatccttagcaagcttgtatcatctgttgtatataattattaattttttaggagttttgatactttcctccattta

SEQ ID NO: 27 - DNA, 2129 bp, Glycine max
agaagagagttattcggtctggtggtggagccacagtgagaggaaagaaacagagcactatccacggtgagtgaacacgataaccgaggcgaggcttccatcgccacatatattaaaaactaaaaaacacaaaacagaaaaaacagctgcaacttttactgcctttttcccgggaaaaataataacagcctctgccgcagttcgttctttctcagatcgcgccaccggaaccgccatggaggacttgtccggccacctgaatattcctccggccgcctccgcggcgactctccgccacgtggaccgcatgatcaactccaaccactacacctcgccttccaggacaatctactccgaccgcttcattcccagcagatctgcctcgaaattcgcactcttcaacatcgcttcgccgcccgagggccgcgacgacagctccagtgcctacaccacgctcctccgcaccgcgctcttcggccccgacttcgcgccgccgcccacgccggagaaaacggcctcgccggcgatgacgctccccagccgaaatattttccggtacaagacagagacgcgccagtccatgcactcgctctcgccattcatgtgcgaggattcggtgcccggcgttgttcacggtccggtcaaggctccgaggaaggttccgaggtcgccttttaaggttctggatgcgcctgcgctgcaagacgatttctacctgaatcttgtggattggtcttcgcataatgtgttggctgttggtctgggaaactgtgtttatctttggaatgcttgtagcagcaaggttactaaattatgtgacttggggattgatgaccttgtttgttcggttggctgggctcagcgtggtacacaccttgctgttggaacaagcaatggtaaagttcagatttgggatgcatctcgatgcaagaagataagatctctggagggtcatcggttacgtgttggggccttggcttggagttcatctcttttgtcttctggtggcagggataagaatatttatcaaagagatatccgtgcacaagaagattttgtcagtaaattatcagggcacaaatcagaggtttgtggactgaagtggtcttatgataaccgtgagttggcatctggaggaaatgacaacagattgtttgtttggaatcaacactcaactcagcctgtcctaaagtactgtgagcatacagcagctgttaaagctattgcatggtctcctcatcttcatggacttcttgcatctgggggaggaactgcagaccgatgcatacgtttctggaatacaaccacaaactcacacttaagctgcatggacactggaagccaggtttgcaatcttgtctggtccaaaaatgtcaatgaactagtaagtacacatggctattcccagaatcagataattgtttggagataccccaccatgtcaaagttggccactcttacaggccatacctatagagttctttatctagccatttctcccgatggacagactattgtaactggagctggagatgaaacacttaggttctggaacgtattcccttcccctaaatcacagaatactgatagtgaaatcggagcatcatctcttggaagaacaattattaggtgattgctcctggcattttgattcaatcatgtggcattattcaaagttttgacagaaagaaatatcagaatagagagcaccatggtgaaaaaacttatcatgtgaaaaatacatgacaatggcatgctttaccgattagagcagggagttatgaaagttacatgatggctgccaaagattatagacattcatgcgattcgtgtggagtctcatttcttatttacaacaaggtcaatttatttaattgtcagtcggagatttatacatgttaatggagttgtagcttccttctttctctctccttcggttcttttattctttacaatagttttctccgatgttatacattcaagatgagtatacagagagcatccttagcaagcttgtatcatctgttgtatataattattcgttttttaggagttttgatattttcttccatttattagccctgtcgctgttacttctgattgttcaatgaagttttatttaaaaccaa

SEQ ID NO: 28 - DNA, 1954 bp, Glycine max
cgttgcaagagatgcggaagagaatagagatagaggggtccagtatatatatagcgtaggcgccattgctaggttttcccgctaaaacgtgtgtttttcccggcaaaattccgagagctttcgatttcataaataataaaaaaaaagtcccaagagaaaggaatttggtttggttatcatggacgaatcattcactccagcaccaccacctcctccaatgtccctttctcggcacgatcacgtccaacgaatgataaactcgaagcgctacaagtcaccttcgaaaacaatatactccgacaggttcattccgagcagatccggttccaatttcgatctcttcaatctaccttcgccgtcgtcgtcagaggacagttgcagttgcagcccctacagcaccgcgctgcggagggccttgttcggaccagacactcccgataaatttgaaagccctaatatattccgttacaaaacggagactcgaaagtctatgtattctctctcacccaccccttttacttcccaggatgatcttctccctggttatgacaacaatcataaacctcccaagcgtcctcgcaagattcctccctcctcttttaaggttttggacgcccctgcgctgcaagacgatttttatctgaatctcgtggattggtcatccaacaatatcttggctgtggctctggagaactctgtttatttgtggaatgcttctagcagcaaggtaactaaattatgcgatttggggattgacgattcagtttgttcagttggctgggctccacttggtacctacctgtctgttggatcaaacagtggtaaagtccagatttgggatgtatctcaaggcaagtcaataagaactatggagggtcatcgtttacgtgttggggccttggcttggagttcctctcttttgtcttctggtggccgggataaaagcatttatcaacgagatatacgtgcacaggaggattttgtcagtaaactgtctgggcacaagtcagaggtttgtggactgaagtggtcttatgacaaccgtgagctagcatctggaggaaatgacaacaggttgcttgtttggaatcaaaagtcaacccagcccgttctgaagttctgtgagcatacagcagctgttaaagctattgcatggtctcctcatgtaaatggacttcttgcatctggaggaggaactgtggaccgaaacattcgcttttggaatacaaccacaaactcacagttaaactgtatcgacactggtagtcaggtttgtaaccttgtttggtctaaaaatgtgaatgaactcgtaagcacacatggttactcccagaaccagataatagtttggaaatatcccaccatgtcaaagctagcaacgcttacaggccatacttacagagttctttatcttgccatatctcctgacgggcagactatcgtcactggagctggagatgaaactcttaggttctggaatgtattcccttcgcggaaatcacagaatactgagagtgaaattggagcttcatcttttggcagaactatcatcagatgactctagccaatatttttttgacccccacatatgtggctgaaagaaatttcagaacaagaaactgtggggaaaattttgtatatgcaaaagtcattaccatgtttatttataattgaggacgtcttacgggtgctatgaatctacaatatagctgccggggaaatccatgtccttcacttgttatttcgtcgagctttgatatgtacatgtcgagggagttgaagtcaactttggttttcttccattgttcttttcagtaatgcgccttgcattatatttaggtgaatttaagattgcatagaaacatcttttacatgtaatgaaatagcatttgtatataaatactttatcgggatggtgttaatttataagtgcaagtttggtgtcccctaaaaa

SEQ ID NO: 29 - DNA, 1849 bp, Glycine max
gccattgataggttttcccgcgaaaagtatgtatttcccggcaaaattctgagagctttttttggatttcaagagaaaggaatttggtttggctatcatggacgaatcattcactccaatgtcgtcttttcaacatgaccacgtccaacgattgataaagtcgaaccgctacaagtcaccttccaaaacaatctactccaacaggttcattcctagcagatccggttccaattttgatttcttcaatctacctccgtcgtcctcgtcagaggacagttgcagttgcagtccctacagcaccgcgctgcgaagtgccttgttcggaccagacactcccgataaatttgaaagccctaatatattccgttacaaaacggagactcgaaagtccttgtattctctctcacccaccccctttactttccaggatgaccttctccctggttatgaccacaatcaaaaacctcctaagcgtcctcgcaagattcctccttcgtcttttaaggttttggacgcccctgccctgcaagacgatttttatctgaatctcgtggattggtcctccaacaatgtcttggctgtggctctggagacctctgtttatttgtggaatgcttctagcagcaaggtaactaaattatgtgatttggggattgacaactcagtttgttcggttggctgggctccacttggtacctacctggctgttggatcaaacagtggtaaagtccagatttgggatgtatctcaaggcaagtcaataagaactatggagggtcatcgtttacgtgttggagctttggcctggagttcttctcttttgtcttctggtggccgggataaaagtatttatcaacgagatattcgtgcacaggaggatttcatcagtaaactgtctggacacaagtcagaggtctgtggactgaagtggtcttgtgataaccgtgagctagcatccggaggaaatgacaacaggttgcttgtttggaatcaaaagtcaacccagcccgtcctgaagttctgtgagcatacagcagctgttaaagctattgcgtggtctcctcatgtaagtggacttcttgcatctggaggaggaactgcggaccgaaacattcgattttggaatacaaccacaaacacacagttaaactgtatcgacactggtagtcaggtttgtaaccttgtttggtctaaaaatgtgaatgaacttgtaagcacacatggttactcccagaaccagataatagtttggaaataccccaccatgtcaaagctagcaactcttacaggccatacttacagagttctttatcttgccatatctcctgatggacagactatcgtcagtggggctggagacgaaactcttaggttttgggatgtattccctttgcagaaatcacggaataccgagagtgaaattggtgcatcttttgggagaactatcattagatgactctagctgacatatttcttgacagccgcacaagtggctaaagaaatttcagaacagctagaagacggtggagatttttttttttgtgtatgtaaaagaaaagcatcggcgtggtctgttttttctaactggggaagttcgtggatgctatgatttacaatatagctgccaacaatggaaatccacgcctttcacctgtttttttaattgaactttgatatgtacatgttgagggagtcgaggcatttttggttttctcccattgttctttccagttaacgcgacttgcgttatatttgaataatttgcctgtaacaacggaatagtgtttgtatataaatactttcttgagatggtgttaatttataagggtaagtttggtgtcccctcaaa

SEQ ID NO: 30 - DNA, 2003 bp, Glycine max
gaagcctaactagtaattgaccgttggaatctctttaagaaaataaatttataagctttgcaaaaccaacctcctttcctcttccctcttcccaggctcctcagaattcgaccgttaaatttataacccaaaaactagtctcattcttcttcttccgttgcacaaaaaacatatttgtttcgtttatctctttctcctctatagtagtagctaaaaatggaggcgaagaaatcgggtttgaatctcccagctgggatgtccggaacctcactccggctggacactgcagcagcatcttccatctcgaccctcaattctccttcttctctccgttccatctctaatctcacctcgccttcgaaatccaactcggcttgcagcgacaggttcattccgtgccggtcctcctcgaggttgcacacgttcgggctcctggacaggccctcgccggtgaaggaagggagtaacgaggcttattccaggttgttgaaatcagaactctttggatctgactttgcttctccttctctttctctttcttcccctgcaggtgctgctcctccttcgccgctcagccccagcaagaacatgctccgcttcaagaccgaccactccgtcgcgccttcttcgccttattcgccgtccattttgggacagcagaatgcctttccttctgactcttctaccccgcctcccaaacctcccaggaaagtcctcaagacgccccacaaggttttggatgccccatcacttcaagatgacttttatttgaatctggtggactggtccacacaaaatgttcttgctgtggggctaggcacttgtgtgtatttatggagcgcttcaaacagcaaagtgactaagttatgtgacttggggccttatgatggtgtctgctctgtccagtggacccgggagggttcttttatatccattggtacaaatcttggtcaagttcaggtttgggatggaactcagtgtaagaaggtcagaaccatgggtgggcatcagacaaggactggtgttttggcatggaattctcgcattttggcttcagggagcagagataggaacatacttcagcatgacatgaggattccgggtgactttgttagcaagcttgttggccacaagtctgaggtatgtggattgaaatggtccagtgatgacagggaacttgcttctggtggtaatgataatcagctcctggtatggaatcaacactctcagcaaccagttttgagacttaccgagcacactgctgctgtgaaggccattgcttggtcacctcaccaaagcagtctccttgtgtccggaggtggaactgctgataggtgtattcgtttttggaacactacaaatggccatcaattgaactgtcttgacactgggagccaggtctgcaaccttgcttggagtaaaaatgtgaatgaactagtaagcactcatgggtactcccaaaatcagatcatggtgtggaaatatccatcattgtcaaaggttgcaactctaactggccacagcatgcgagtgctataccttgcaatgtctcctgatggccagacaatagtaactggtgcaggagatgagactctacggttttggaatgttttcccatcaatgaaagcacctgtcccggttaaagatacaggcctttggtcactggggcgcacacaaattcgatgatccatttgatgtgtcataccaataaggaagaagatgaggaaagaaagctatctcaataatttgtaattaatatctgtatatgaaataatattggtttacatttacttgtcatataataggtttcaattctttgtaaagttctcaatatcgtcattctcattgtaaagtgtgtaacatatatcaaacacggacatataggaacttataaattgtaaagtctgcatctaaattcaattgactcgttataataatggtttcaattcattgtaaagttctcagtatatcaaacacagacataggaacttacaaattgtaaa

SEQ ID NO: 31 - DNA, 2062 bp, Glycine max
attggaaccaacccaacagcttctctctttgctttcacacacgcagaaagagagagagaggccatcatcatcttcttcttcttcttcttcttcttcttccattgcccaagaacatatttttttagttcatctctttctcctccattgtgaaagctgaaaatggaatcccctcatgcgaagaaatcggggggtttgaagctcccagctggcatgtccggaacctcactccgcctcgacaccgcgccagcatcttcttctttccgttcttccatctcgaccctcaattctccttcttctctccgctccatctctaacctcacatcgccttcgaaatcgaactcggcctgcagcgaccggttcatcccgtgcagatcctcctcgaggctgcacacgttcgggctcgtggacaggccgtcgccggtgaaggaagggagtaacgaagcgtattcgaggttgttgaaatcggaactctttggatctgactttgcttctccttctctttcttctctttcttctcctgcaggtgctgctgctcctccttcgcctctcagtcccagcaagaacatgctccgcttcaagaccgatcactccgccgcgccttcttctccttattcaccgtccattttgggacagcagaatggcttcacttctgactcttccacaccgcctcccaaacctcctagaaaagtccccaagacaccccacaaggttttggatgcaccatcacttcaagatgacttttatttgaatctggtggactggtccacacaaaatgttcttgcagtggggctaggcacttgtgtttatttatggagcgcttcaaacagcaaagtgactaagttatgtgacttggggccttatgatggtgtttgttctgtccagtggacccgggagggttcttttatatcaattggtacaaatcttggccaagttcaggtttgggatggaactcagtgtaagaaggtcagaaccatgggtgggcatcagacaaggactggtgtcttggcatggaattctcgcattttggcttcagggagcagagataggaacatacttcagcatgacatgagggttccaggtgactttgttagcaagcttgttggtcacaagtctgaggtatgtggattgaaatggtcctgtgatgacagggaacttgcttctggtggtaatgataatcagctcctggtatggaatcaacactctcagcaaccagttttgagacttaccgagcacactgctgctgtgaaggccattgcttggtcacctcaccaaagcagtctccttgtgtctggaggtggaaccgctgataggtgcattcgtttttggaacactacaaatggccatcaattgaactgtgttgacactgggagccaggtctgcaaccttgcttggagtaaaaatgtgaatgaactagtaagtactcatgggtactcccaaaatcagatcatggtgtggaaatatccatcattgacaaaggttgcaactctaactggccacagcatgcgagtgctgtaccttgcaatgtctcctgatggtcagacaatagtaactggtgcaggggatgagactctacggttttggaatgttttcccatcaatgaaagcaccggcccccgttaaagatacaggcctttggtcactggggcgcacacaaattcgatgatccattttttatgccatatggaataaggaagggaagagaggggaggaggtagagatgaggaaagaagaaagctatctcaataatttgtaattaattatatctgtatatgaaataatattgccaatcattgcgagttttcaaacacggacataggaacatcaatatattggtttacttgtatattgatggtttcaattccttgtaaagttctcaatattgtcattgtcattgtaagtttgcaacatatatcaaacacggacagaggaacttgtaaagtctgcatctaaattcagtttacttgttataataataatggtttctcaattcattgtaaagtttttaaatatatcaaacacagacataggaacttataaattgtaatgtcggcatctaaattcaa

SEQ ID NO: 32 - DNA, 2712 bp, Glycine max
actaaaaaccaaacccacccctcattttccattctctctattttctctcctctatctaaacttaacttccattccagtataagcagataggcagatacatcgtattcacgtgggtctgcatgcccctaacaaaactctccttccactatccattaataccatccccctccttaccctaatttaacatcacacatccaatacatttcgtttacccacgctcccccctctctctctctctacactatcatactaccactcagctcaaaaaaaaaaaaaaaaaaaatatatatatatatatatatatatcttttctttttaattttataattttggtgaaaatagcaagagagaaagggttggaattggaaatatcttaccggagaatgggcgacggcagcatcgtgggccacctgccggaggagattctgttgaacgtgttctccgccgtgtccgacacgcgcacgcggaacgcgttgtcgttggtgtcctggagcttctaccacttagagcgcaagacgcgcacctcgctcacgctccgcggcaacgcgcgtgaccttcatctcatcccgacctccttcaagcacgtcacgcacctcgacctctccttcctctcgccttggggccacgcgctcttttgctcctcctccgccacagtcggccaccagagcctcctcgcgcaacacctccgcgccgcgttcccgcgcgtcacctcactcgcgatctacgcgcgtgacccgtacactctccgcctcctcctcctctccgcctggccggagctctccgccgtcaagctcgtccggtggcaccagcgcccgccgacctccgctaacgaagccgacttcgccgagctcttcaagaagtgccgatcgctcgcctcgctcgacctctcctccttctaccactggacggaggacatcccgaaagtgctcgcggcgaatcctatctccgccgccacgctccgccgcctcaacctcctaacaacctccttaccggagggattcaaggctcacgaaatcgaatcgattaccgcgtcgtgcccaaacctggagcactttctcgtggtctgcaccttccatccgagatatatagggttcgtcagtgacgacacgctggttgctattccatccaattgcccaaagctctcgctgcttcacttggccgatacgtcgtcgtttttgaatcgcagagaggacgagggtttcgacggagaagacgctagcgttagccgcgctgccctcttgactttgttctctggacttcctcttttggaagagctggtgttagatgtttgtaaaaatgtcagagagagtagttttgctttggaagtgttgggttccaagtgccctaatttgagggttctgaagttgggacagtttcaagggatatgcttggcgtttgggtctcggcttgacggaattgccctttgccacgggcttcaatcgttgtctgttggaaactgtgcggaccttgatgacatgggattgattgagattgccagagggtgttcgagactggttaggtttgagcttcagggttgcaggcttgtgacggagcgtggactgaggaccatggcttgtttgctcgccaggactctgattgatgtcaaggtttcttgctgcgtcaaccttgacaccgcagcgactctccgagccttggagccaattagggagcggattgagcggctccatgtggattgtgtgtggaatgggttgaaggagagtgatggcctgggacatgggtttcttaattttgatttgaatggtttggatgaaccgggtgatggtggtgaattgatggattactttgggggtggagaatgtgagaacgcaaccaaaaggaagaggcagagatgtgagtatgaaatgggggttcatgattcctttttgcaaagcaatggcaatggtttctgtggcaagagctgggacaagctgcagtatctttctctttggataaaagtcggtgatctgttgactccattgccagtggcagggttggaggattgtcccgtcttggaagagattcgaataaaggttgaaggagatagcagggggcagccaaaacccgcagagagcgaatttggtctgagcattctggcttgttatcctcagctattgaagatgcagctggattgtggtgatactaaaggttatgctctcacggcgccatcggggcaaatggatttgagcctgtgggagaggtttcttctgaatggcattggcagtttgagtctcggtgagcttcattactggccaccacaggatgaggatgtgaaccagaggagtgtgtcacttccagctgctggcttgctacaagaatgttacactttgaggaagctcttcattcacgggacagctcacgaacatttcatgaatttttttctcaagataccaaacctaagggatgtacagctgagggaggattattatccagctcctgaaaatgacatgagtacagagatgagggtaggttcgtgcagccgctttgaagatgcactgaataggcgtcgaatctgtgattgacttgtaatgttatagaccctgacaatggaaattgctttgatgtagaaaaagtttacgttttggagtttctgccgattattaacatcttgcttgtcttttagtttatttatttctgtttcctttccctctttttacactgtaaccacgagactcgtgtccaatgttttagtcaagaaataaataattctataca

SEQ ID NO: 33 - DNA, 2047 bp, Glycine max
tttacttgagtgcaaaaagagcacactggttgtgttgtgtgagtgcgagagacacgaagagaggtccttggatagtagtacgtggagtacgttttcaggttcagccctttgttttactgttaacgtctccaaaatttggtttacaaaagcaaaacgccataagaatcagaaaaggaaacaaagaccactggttttgagtctgttatctgctgctttacctgatttagcttacaaacacacacctcgagctctgtgttgatcgcttttcccatttccactcttgcggtataaagatgagaacttggaataaaagtgatatcaacatgaagtttgcagatcacagtgaccattagtatatgaatttctaaggtcttgtcatggagtggaatgcaaaatctctcgggcaatgggactgggagcacttattcttcaatacaaaagcagctgagaatccaaggttacaaccaactgattgtagcagtgaagcagatccagaaatcaatgttggactgttgtatccatcaggtggtagtgcttgttctggctctgaactaatacatgcttcttcatcaaggagctcaaaatcagcttccaacaattcatcatcaaatggggatagcagggaatctatattgactctggaaggttctcaggatgattccactgggaagaaagaattgtgcaatggagagccggttgaaacttctccagcagcagtgccctctcctgtctctggtgaaccattgctcactctaaagcttggtaaacgattgtactttgaggatgtctgcaccggaagtgattccaagaaaccatcttcctttgaggttcccattttatcagggaagaaatataaaacaagtagtcagactgtacagcatccaagctgccaggtggaaggctgtggccttgacctctcatctgctaaagattaccatcgcaaacacagagtttgtgaagctcattccaaatcccctaaggtggttatagctggtttggaacgtcgattttgccagcaatgtagcaggttccatgctctgtcagagtttgatgacaaaaaaagaagctgtaggcaacgactttcagatcacaatgcaaggcgccgcaaaactcagcctgactcaatccaattaaatccatcagctttgtcttcatctccctatgatgggaggcaaataatgagcccatttgcattttcaaggactgctacaaatttagcttggcaagatatgcacagcagcaagcacccccaaacaaaagaattcctcccgaagcctgccaaagccttcaataagataccgagtatagtctctatgctttctgatgattccagtggccttctaacatctagaggcatagcaacgaagagtattgttccaggtatggaagttccaaatggtacacaagatgttaaccgtgctctctctcttctgtcaacgaattcatcatggtgtccatatgagaccaagtccctttctctggaacactccactcggacaacacactcaatcactcagcatcgtttaccacttccttcctcggagtattggcacactgatcaacaaaattcaagcatgtgtatctcattctcggattgcgatagcagcaatcgctttcaagactttcagctcttgagctcaccctatgaatcaggttttccgtgcaaccaactggattaacaacactatgcttctactacaacaagatttctagtctgcatgttatttttaaatggagattaactaaaactgcatggaactcgctccatttcccgaatggtgtttgtaccagactgcgctcatttagtttctacataaccaacctaccatgtctccactggcaacaacttttaataccttagcttcttactattgttacgcacatctccatgcttcatcatactactatttaccttgcaggcttataataaataaataacttgtaaaatttaggctgttagaaacacatcccatatcattcgtttccggagtttggaagctttacatgtttctactttctatcttcattatattattggttaaattga

SEQ ID NO: 34 - DNA, 1383 bp, Glycine max
gaggcagagtgatcgatctgattgactgatggtaacactggttggtggtggcagttataaatagcacccaaagagacaaaggcttgggcaaagaaaaatacttataaaaagaatcaaacagctacaacttgaactgttcataacccacaccaaaagttccaaaccccaacccgaaaaatcacacacaccccctttggaattgggatccatcgccatatctctgattaggttagataagattccctatgggcacttccattctcgacgccctgaacgtccgcgtggaaggttccggcgataagtaccttttcctggcccacggcttcggcacagaccaatccgcgtggcagcgcgtgctcccttacttcacccgcaactacagcgtcattctctacgacctcgtctgcgccggcagcgtcaaccccgaccacttcgactaccgccgctacaccaccctcgacgcctacgtcgacgacctcctcaacatcctcgacgccctccgcgtcccccgctgcgtctacgtcggccactccatctccgccatgatcggcatgctggcctccatccgccgccccgacctcttctccaaactcatcctcataggcgcctcccctagattcctgaatgacaaggactaccacgggggatttgagcagggagagatcgagcaggtgttttcggcaatggaggcgaactacgaggcctgggtgaacggtttcgcgccgctgtcggtgggagcggatgttcccgcggcggtgcgggagttttcccggacgctgttcaacatgaggccggacatctcgctgttcgtgtcgcggacggtgttccacagcgacctgagggggattctgggtctggttaacgtcccctgttgtattatgcagacggcacgtgacatgtccgtgcctgccagcgtggcgacctacatgaaggaccacatcggcggaaagagcagcatccagtggctggacacggagggccacctcccgcacttgagtgctccttcatacctggctcgccagcttgagattgcgctttcccagtagcgcgtggggaggcgcgtgctagtcctggcgcgtgggtctgcttgttaatttaagtaatttaactctactagtactagtactaccagtataggagaagaataggcagggtcctagaaaaacaagtgtacgaaaggctctgaaagtggacacctggtaaataacgtgtgggtgttgcttcttagactttgggatttttatttaaggatcagaatctgcacgtggatttcacgtgatgcctggccatttttagtattcttgtgcttctctcctctgtttcttagtgtgatgggtgttattattaatattattacagaaggtcttggttttgttgttggtt

SEQ ID NO: 35 - DNA, 2266 bp, Glycine max
caagagtcccccccccccaaattaataaagcctcgctctctttctcttcatttgtagattcctatactgttgcaaggaaaataaaacaaacaaacacacatggtattcatggattatttggaatggttgcttccaattccaagtgtcccttctgcttcagcaatgttcaccctgcttgctttaataggaggattgttggtttatctgtatgcaccctattggggtgtaaggaaggttccaggcccaccatctctgccccttgtgggacaccttcctttgttggctaagtatggtcctgatgtgttctcagtccttgccaaacaatatggtccgatttacagattccatatgggaagacagccactaataattatagcagatgcagagctttgtaaggaggctggaataaaaaaattcaaagacatttcaaacagaagtattccctccccaatttctgcttctcctcttcaccaaaaaggcctcttcttcagccgggattcacaatggtctatcatgcgaaacactatattatcaatgtaccagccatcatacttgtccagattagtgccaacaatgcagtccttcatagaatccgcgacccaaaacctcgactctcaaaaagaagacattatattttccaacttgtccctaagactagcaactgacgtgattggacatgcagcatttggtgttaactttggcctctctagtccccattcagtttgtgattccatcaagaatgttaatgttaacaataacaataacaatgcaagtgctagtagtagtaatagtaatgataatgaagtatcagatttcatcaaccaacacatatactctacaacacagcttaagatggacttgtctggttccttgtccattatcttgggtctgcttttgccaatacttcaagagccatttaggcagattctgaagagaattcctggcaccatggactggaagattgagcataccaaccagaaactaagtggtcgtcttgatgagatagtggagaagagaatgaaagacaagacacgaagttcgaaggatttcttgtcactcatacttaatgccagagaaacaaaatctgtttcagagaatgtgttcacacctgagtacataagtgctgttacttacgagcacttacttgctggctcagcaaccacgtcctttactttgtcttctgttgtctatttggttgctggacaccctgaagttgagaaaaagttgcttcatgagattgatgggtttggtccagtggatcagataccaacttctcaagatcttcatgacaagtttccttatcttgatcaggtgatcaaagaggccatgaggttttacactgtctccccattagttgcaagagaaacatcaaatgaagtagagattgggggctatcttcttccaaaggggacttgggtctggttagcacttggagttccagcaaaagaccccagaaactttcctgagccagacaagttcaaaccggagaggtttgaccccaactttgaagaaatgaaacgaagacatccttatgcttttataccatttggaattggtcctcgggcatgcattggtagacaattttccctgcaagagatcaagctttctctgattcatttatatcgaaaatacttgtttcggcattctcccaatatggaaaaccccttagaactccaatatgggatagtcctcaacttcaagcatggggtcaagctcagagccataaaaagaaaagaggcttgctaagtaaacagttctgacttcgcattatcgcatatactagtaaagagttcagaagatgaattatgcattattatcttatagtaatattgagtgcgctaaaatccaaaaacgaacaattgtgatgttacatagaatcagccaataagtgtttaaaaataataggtcaacgagtgtgttattagcatttcccaaatatagaatgcaagtttataagagtaagagacactcttcctacaagattatgaaatggcattatcatttgtggtaaaaaaaactcaagggacaaaaaaatccgtctaaatgtgttaaccaaaggagtgtttccccatatagttatgcttaagttgatttatctggataagcctctcagcactgagtaatatcaaaacccacaaataaacaattatacaaaatggagacccctcacaagtattcccaaacacaaaagctacttctagccagctaactaactcaatttaaattgcatggaacaacaagatgttgaacttcttggaaaaaaaaa

SEQ ID NO: 36 - DNA, 1810 bp, Glycine max
acccatgaagtgagactacagcctcaccactcctctaatttcaggaaccaaaaaaccttagtctctgtctctttcctttggtatatacacactgcacatgccaaaataaaaatggtgtccatagtattggaatggttatttccttttccatgtgtagccatgttcaccacccttctgatgttaataggaggattattgggttatctttatgggccctattgggggcttaggaaagttccaggcccaccaacgctgccgctggtaggacaccttcccttactggctaaatacggccctgatgtcttctcactccttgccaagcaatatggcccaatttacagatttcatatgggaagacaaccactaatcttggtagcagatccagagctttgtaaagaagtgggaataaaaaaattcaaagacattccaaacagaagcattccctctcctatttcagcttccccccttcaccaaaaaggtctcttctttaccagggactcacgttggtcaaccatgcgaaacacgatcttgtcagtgtaccagccatcacacttggctagcttagtgccaacgatgcaatcattcatagaatccgcaacacaaaatcttgacaccccaaatgaggacataatcttttccaatctttccttaaggctagcaaccgatgtgattggagaggcagcatttggtgtcaattttggcctctctaagccacattcagtttgtgaatcaatcaagagtgttagtgttaacaatgtgagaaatgatgatgatgaggtatctgatttcatcaatcaacacatttactccacaacacaacttaagatggacttgtctggttcattctccatcatacttggtctacttgcaccaatacttcaggagccatttaggcagattctgaagagaataccaggcacaatggacagcaaaatagagagtactaatgagaagttgagtggtcctcttgatgagattgtcaagaggagaatggaagacaagaatagaacttcaaagaatttcttgtcactcattttgaatgcaagagaatcaaagaaagtatctgaaaatgtcttttcacctgattacattagcgctgttacttatgagcacttacttgctgggtcagctaccacagcctttaccttgtcatccattgtctacttggttgctggacaccgagaggttgagaaaaagttgcttcaagagattgatggatttggtccacctgataggattcccacagctcaagatcttcatgacagttttccttatcttgatcaggtgattaaagaggccatgaggttttacacagtctccccattggttgcaagagaaacatcaaatgaggtggagataggaggttaccttcttccaaaggggacatgggtatggttagctctaggagttctagcaaaagatccaaggaattttccagagcctgagaagttcaaaccagagaggtttgaccccaaatgtgaagaaatgaaacgaagacatccttatgcattcataccatttggaattggtccccgggcatgtattggtcagaaattttccctacaagagatcaagcttactctgattcatttgtaccagaaatatgtttttcgtcattcagttgacatggaaaaacctgtagaaatggaatatggtatggttctcaacttcaagcatggtatcaagcttagagtcataagaagaacgtaataatagagtgaccatgtataccaactaagattgtactttgtgatgcaatggatgaattaaaatctctctttaatatgttgtgattgtcaacaaggcaaaa

SEQ ID NO: 37 - DNA, 1709 bp, Glycine max
tcccttgctggctaaatatggccctgatgtgttcccactccttgccaagcagtatggcccaatttacagatttcatatgggaagacaaccactaatcttggtagcagatccagagctttgtaaaaaagtgggtatcaaacaattcaaagacattccaaacagaagcattccctctcctatttctgcttctcctcttcaccaaaaaggtctcttctttaccagggactcacgttggtcagccatgcgaaacacgatcttgtcagtgtaccagccatcacacttggctagcttagtgccaatgatgcaatcattcatagaatccgcaacacaaaatcttgataccccaaatgaggacataatcttttccaatctttccctaaggctagcaactgatgtgattggagaggcagcatttggtgtcaactttggcctctctaagcccatttcagtttgtgaatcaatcaagagtgttagtgttaacaatgtgagaaatgatgataatgataatggtgatgatgaagtatcagatttcatcaatcaacacatttactccacagcacaacttaagatggacttgtctggttcattctccatcatacttggtctacttgcaccaatacttcaggagccatttaggcagattctgaagagaataccaggcacaatggacaggaaaatagagagtactaatgagaaacttagtggtcgtcttgatgagattgtcaagaggagaatggaaaacaagaatagaacttcaaagaatttcttgtcactcattttgaatgcaagagaatcaaagaaagtatctgaaaatgtcttttcacctgactacgttagtgctgttacttatgagcacttacttgctgggtcagctactacagcctttaccttgtcatccattgtctacttggttgctggacacatagaagttgagaaaaagttgcttcaagagattgatggatttggtacacctgataggattcccatagctcaagatcttcatgacagttttccttatcttgatcaggtgattaaagaggccatgaggttttacactgtctccccattggttgcaagagaagcatcaaatgaggtggagataggaggttatcttcttccaaaggggacgtgggtatggttagctcttggagttctagcaaaagatccaagaaattttccagagcctgagaagtttaaaccagagaggtttgaccccaaatgtgaagaaatgaaaagaaggcatccttatgcattcataccatttggaattggtccccgggcatgtattggtcagaaattttccctacaagagatcaaactttctctgattcatttgtaccgaaaatatgtttttcgtcattcacttgacatggaaaaccctgtagaaatggaatatggtatggttctcaacttcaagcatggtctcaagcttagagtcataagaagaacgtaatactgtgatgcaatggatgaattaaaatctctcttcaatatgtagtgattgtaaacaatgcaaaatatgcttatgtaattcaaacaagtacaattttgctgagatgatacaggatattaaacttttatgcaaattttatgaaagaaaaagtattttgactttgaatgtgtctacaaaagcagattccccccactaattgctgggtctcactctcttcaattttatactttgtttaggccttgcagttctcttgata

SEQ ID NO: 38 - DNA, 1262 bp, Glycine max
gtgtgaagattctttccatgcactgtttgttttttttctttctttctttttactttctatatataattaactaattaagccctctcatccctccattccccattctctctcacacaaaatggaagcaaaattggttgcacagtgcaagagtccaacactaagtttagctcaccgaaaaccaaaacacccttgtgtggtggttggagtgctggcaaggcctgttgatgagatttcaggagaagcaagaaaaacaaatcatgtgtacaaagatggtttgtttgatcgcataaccataaactatttatcaaaatgcgttcaagaggcaacaggactcagaaataataagagtgggtatgagagcctggtagatgctgctaccgtggcttcacagagatttagtcctgttgaacaacatcaacttgtcattcaatcccttgacagagccttccccaagccaatgcttttattgataaggaaactgctaccaccatctaaattcgcaaggaaattgtttgccgtcttcaccactttgttctttgcttggttagttgggccctctgaggtgagagaatcggaggtcgaggggagaagagaaagaaatgtagttcacataaaaaaatgcaggttcttagaagggacaaattgtgtaggaatgtgtatcaacctttgcaaactcccatctcaatcgtttataaaggattctctgggtatttcagtcaacatggtccctaattttgatgacatgagttgtgagatgatatttggccaggatcccccagaatcaactgatgatccagcactcaagcagccgtgttttaaactatgcaaggcaaaaagaagccatggaacgaattgcctcgttattaattaatgcagcagggtttcaggtcagcaaggaagaaacaagaatggcccacctttcatatgctgacaaagctgagactcatcacccatcgtttttattaggaaaacagctaagtggtccaatgcacttttagccattaacgtctcatctgcaattggatttccgtcatttcaatacttagaaagctataaattggcgctcaagtatgcagaagtagagtaagtggacactggaatatttatatggtatatacattggtaatttggtaattggcatagtgttctttccaatgccattttcttcctccttttttttttcctaattcatatattgctatagtataggatgattgttacaataaataaatgattattgattactgtaattttcattttta

SEQ ID NO: 39 - DNA, 1181 bp, Glycine max
gcatgtaacacacccgataccactatctccgaatcaggagcataagctatgtgtgaagatgctttccatacactatttgtttttcttatttctatataattaattatgccctcttatccctccattccttgattctctctctcacaaatggaagcaaaattggttgcacagtgcaatagtccaacactaactttagctcactggaaactaaaacaaccttgtgtggttggagtgctggcaaggcctgctgatgacatttcaggagaagcaagaaaaactaatcatgtgtacaaagatggcttgtttgatcgcatagccataaactatttatcaaaatgcgttcaagaggcaacaggactcaaaaatagtaagagtggttatgagagcctggtagaggcagctaccctggcttcgcagagatttagtcctattgaacagcatcaacttgtcattcaatcccttgacagagcctttcccaagccaatgcttttactgataaggacactgctaccaccctctaaattcgcaaggaaattgtttgccatcttcaccactttgttctttgcttggttagtcgggccctctgaggtgagagaatcagaggtggaggggagaagagaaagaaatgtagtccacataaaaaagtgcaggttcttagaagagacaaattgtgtaggaatgtgtatcaatctttgcaaactcccatctcaatcgtttataaaagattctctgggtatgtcagtcaacatggttcctaattttgatgacatgagttgtgagatgatatttggcgaggatcccccagaatcaactgatgatccagcactgaatcaaccgtgttttaaactatgcaaggcaaaaagaagccatggaaccaattgcctcgttataaattaatgcagcagggtttgaggtcagcaaggaagaaacaataatggcccacctttcatatgctgacaaagctgagactcatcacgcatcatttttttatctcattattattaggaaaacagctaagtggtccaatgcactttaagccattaacgtctcatgtgcaagtggatttctgtcatttcattcaacagttagaaagttactaattggcgctctagtgtgtagaactagaagtagagaaagtggacactggaatttttatatatatagtatactgttctttccaa

SEQ ID NO: 40 - DNA, 234 bp, Glycine max
atggtaaacccaagtaagagcacatcccctatttacttgattcctaggtttcctggaaaaaataatggcaaagagagagattggagagtaccagttgaagcaccttcacagttgtggttgctccatgttggcaatgcctttgaagttagacaccctcatcggaatttggacatacaaatacaagctgctgcttgctcttaccagtggttcaatttcagcaagttatttggataa

SEQ ID NO: 41 - DNA, 1884 bp, Glycine max
ttcaataccaaagccttagtaattaactccaaaaaaatgcaaaccaaacccattcacaacaccccaacatacattcctccacccataaggccatcaccaccggtgcaccaaccgcctccctctataccacctaccaaacctcgtgcagtatctatatccgcacctaatactcctgttgccgtaccaattcctccaattgtagagcctgatgactccaatgctgcctattatgactaccaattcttgttcatatcacaaagatccgaaacaagtcaacccgtcactctaagcaccgtggaaggcgtgatcccagccgatttcccatccggcacgtactacctaaccggaccggggcttctggccgatgatcacgggtccacggtgcaccccctagatggccatggttaccttagggcattcacttttgataacgctactaagaacgtcaagtacatggctaagtacattaagacggatgcacacgtggaggagcatgacccaaagacggacaagtggaaatttacacatagaggcccattttccgtgttgaagggtggaaaaaaggttgggaacactaaggtcatgaaaaatgtggctaacaccagtgtactaaagtggggggaaaagctcctgtgcatgtgggaaggtggggaaccgtatgaaatccaagctggtacgttagatacgattggacggtacaacatgatggatggtgctgatttggaaaatcatgatgagagcaaagatggtgttgatgtatgggaggttgctgctaacctattgaagcctatattatatggagtgtttaagatgcccccaaggagactcttgtctcactataaggttgattctagaagaaacaggctactcaccgtgtcttgcaatgctgaagacatgttgcttccacgcagtaattttacatttgccgaatatgactcaaattttaatgtagtacagaagcaagttttcagaatcccagatcacttgatgatccatgattgggctgtaacggatacccactatatagtatttgccaatcgcataaaacttgatgtactgggatccattgcagcagtgtatgggatgtctccaatggtatcagcattaagggtaaacccaagtaagagcacatcccccatatacctgattcctaggtttccagacaaaaataaagacaaagagagagattggagagtaccatttgaagcaccttcacagttgtggctgctccatgttggcaatgcctttgaaattagataccctcatcggaatttggacatacaaatacaagctgctgcttgctcttaccagtggttcaatttcagcaagttatttggatacgactggcaaaagaagaagctggacccatcaataatgaatgtaaaaggtggaaatgagttattgccccatcttgttcaggtgtctataaaattagattctgactacaattgccaagaatgtgatgtgaaaccgatgaagaaatggcagaaatcctcagattttcctgctaccaacccaacgttttcaggcaagaagaacaaatatctctatgcagcaactaccttaggatctcgcaaaacattgccatgtttccctttcgataccgttgtgaaattagacctagagagtgataattctgcccaaacttggactgctggaagtagaagatttattggtgaacctatttttgttcccaaaggtgacgaagaagatgatggctatcttcttgttgttgagtatgccgtttcaatgaatagatgttacctcgttatcttggacccaaaaaggataggagcagataatgcccttattgcaagaatcgaaattccgagccacttgaattttcctctaggttttcatggtttctgggcagctaattagctg

SEQ ID NO: 42 - DNA, 1641 bp, Glycine max
atgcttgttcctgacatgcctgatatcaatatctcacttcgaaataaaggcatctacaaagggaaacgcaatattaatctgcgagacttgaccaaggcaaatgttgcaagtccatcattacctttgattgccccaccaacacccgaggaacgcccaggaatcacccatgactgccaccaccaccaccatgttgcatggactagtatcccgcaagagagatgggaaggagagttacaagttcaagggcaaataccattatggctggaaggaacgtacctaaggaatggtccgggcatgtggcacataggggactacaacttccggcacctcttcgacggttacgccaccctggtgaggctcggtttccggaacggccggctagtcgcggggcaccggcaaatcgagtcggaggcgtaccgggcggcgaagaagaacaagaagatatgttacagggagttctccgaggtgcctaaggctgcgaatttcctggcctacgtgggggagctggcgagcctgttctctggcgcttccctgaccgacaacgcgaacaccggcgtggtgaaactcggcgacggcagggtggtgtgccttacggagactcagaaagggtccatagtgatagaccctgagacgttggagacagtggggaagtttgagtacagtgactcgttggggggtcttattcactccgcacatcccattgtgacggatgaagagtttttgacgttgttgcctgatttggtgagagcagggtaccttgttgttaggatggagcctggtaccaatgagaggagggtcattggaagggtcaattgtaggggtgggcctgcacctggttgggttcattcttttcctgttactcaacattatgttgttgtgcctgaaatgccgttgaggtactgtgctcagaatttgctcaaagctgaacctactcctttgtacaagtttgagtggcaccctgaatccagagcttttatgcatgtaatgtgcaagactagtgggaaaattgtggcaagtgtggaagtgcctctgtttgttactttccatttcataaatgcgtacgaggagcaagatgaagatgggagggtgacggccattattgctgactgttgtgagcacaattcagatactaccattcttgataggcttaggttgcagaaccttcgttcgtttaatggtgaagatgttctacctgatgctagggttgggcggtttagaataccactggatggaagtccatatggaacattagatgcagcattggagccgaatgaacatgggagaggcatggacatgtgcagcataaaccctaattatttagggaagaaatacagatatgcatatgcttgcggagcacaaagaccttgtaactttcccaacaccctcaccaagcttgattttgaattaaagaaggctaagaactggcatgaagaaggtgcagtgccctcagaacccttctttgtggcacgaccaggagcaacagaggaagatgatggcgtagtcatctccattgtcagtgagaaaaatggagaaggatttgcgttggtgttagatggttccacttttgaagagattgctagggccaaattcccctatggacttccatatgggttgcatggatgctgggttccaaaagagtaa

SEQ ID NO: 43 - DNA, 1959 bp, Oryza Sativa
aagatggcaacaccctgatctctagcttagctgcagaggggagaggaacctcacatccaaactcctagctacaacttgtactagcatcctaagcaaccaagcacaaccaaagcaagcaagcacgaacaattctttcttcctctctacctctagctgctgcctgcctcctaatcctcctacccaccactccacatgagcccatgctgtgtgcctgtgtctgtgtgtgtgttctactcctaccatgagagaagagaccaagcatcaaccaagctagctagctcgtcctctcctcgatctctacttctctctcccacacaagctgagcgcccaggtaggctgcctgctaggtctcgtgcatggccggacacatctgatcatagcccactacggcactattccccccttccgcctcgcacgctgagaggtggccggagagggagggaggccagcgagcagcagtagcagcagcaacgcggctaggagtaaggagtcccatcagtaaagcatgcttcctttcttcgattccccaagccccatggacataccgctttaccaacagcttcagctcacccctccctctccaaagcccgaccaccaccaccaccaccattccaccttcttctactaccaccaccacccacctccctccccttccttcccctccttcccctcccccgccgccgccacgatcgcctcgccgtcgccggccatgcaccccttcatggacttggagttggagccgcatgggcagcagctggcggcggcggaggaggacggggcaggcgggcaaggcgtcgacgccggggtgcccttcggcgtcgacggagcggcggcggccgcggcggcgaggaaggaccggcacagcaagataagcaccgccggcgggatgagggaccggcggatgcggctgtccctcgacgtcgcccgcaagttcttcgcgctccaggacatgctcggcttcgacaaggccagcaagacggtgcaatggctcctcaacatgtccaaggccgccatccgggagatcatgagcgacgacgcctcctccgtctgcgaggaggacggctccagcagcctctccgtcgacggcaagcagcagcagcacagcaacccggcggatcggggcggcggcgccggggaccacaagggcgccgctcacggccacagcgacgggaagaagccggccaagccgagaagggcagcggccaacccgaagccaccgcggcggctggccaatgcgcaccccgtccccgacaaggagtcgcgcgccaaggcgagggagcgggcgcgggagcggaccaaggagaagaaccggatgcggtgggtcaccctcgcctcggcaatcagcgtcgaggcggccaccgcggcggcggccgcgggggaggacaagtcgccgacgagccccagcaacaacctgaaccactcatcgtccaccaatcttgtgagcaccgaattggaggacggctcctcgtcaacgcgccacaacggcgtcggcgtcagcggcggccggatgcaagaaatctcggcggctagcgaggcgagcgacgtgatcatggcgttcgccaacggcggcgcgtacggcgacagcggcagctactacctgcagcagcagcatcagcaggatcagtgggagctcggcggcgtcgtctacgccaattcgcggcactactgctgatgtgatcatccatccacacacgaacgaacgaacgaacggtacggcactaagatcgaactcctgcagctacataattatcctttgcttctcaagagtaataattcttgacgtgttaattaatccgggtgtgtattaattccctctttattattttttctcgcgtttatccggagttgactgtggtgaagacgaactttggtttggtcatcgcatggtgtgcattgcatatatagctagcactatcgtctgatcgatgattcatcatcaatggagtcgtctagtattaa

SEQ ID NO: 44 - DNA, 777 bp, Oryza Sativa
atgcagcagcagctggatcagcagcagcagcagcagcagcatcagtacgaccacttcttctccggccacggccagttcaactccgagacgctggaggccgtgctctgcaggccgccgcgcggcgccgccgcggatcctgctgttccggcggcggcggcggcggcggctgttctgacggcggcaagaaacggtggcggcggccatggcagggcgaggaagcggccgttcaggacggaccggcacagcaagatccggacggcgcagggggtgcgcgaccgccggatgcggctgtcgctcgacgtcgcgcgcgacttcttcgcgctgcaggaccgcctcggcttcgacaaggccagcaagacggtggactggctgctcacccagtccaagccggccatcgaccgcctcgccgccgacccctcctcctcctcccaccgcgccgccggcgacacccgcatgtcgtcggccgagcgcggcggcgatcaccacatggtcgcggtcggcgccgccggatcagggaaaggagacgcggacaaggcgaggggccccagaggtggtagatcggcgcccatggagctcggctgcgagctcggccgcctcgtgccggcgccggtgctcggcgagtactactacgagctcgccgagatgatgagcaacaacaccggaggagaaggagacgacgacggcgactacgacgacgacggcgatttcttggacgactctgggtttctctgccactatcgatcgaagaagaaatttagcataaaggacatttcttaa

SEQ ID NO: 45 - DNA, 1551 bp, Oryza Sativa
atggacatcagcgaggtgctgggcgcaacggcggagtgggcggtcaccttggtggccatggctgtgggtctcctggtggtggcctacttgtacgagccgtaccggaaggtttggcacgtgccgggtcccgtgcctctgccgctcatcggccacctccacctgctcgccatgcacgggccggatgtgttctccgttctcgctaggaagcacggtcctgtcttcagatttcacatgggaaggcaaccactgatcattgtggcggatgcggagctgtgcaaggaagtgggcgtgaagaaattcaagagcattccaaatcgaagcatgccctcccccattgccaattctcctatccataagaaagggttgttcttcataaggggaccgaggtggacgtcgatgagaaatatgatcatctccatctaccagccgtcgcacctggccagcctgatccccaccatggagtcgtgcattcagcgtgcgtccaagaacctcgacggccagaaggagatcaccttctccgatctctctctcagcctcgccaccgacgtgatcggcctcgcggcgttcggcacggacttcggcctgtcaaagctgccagtcacacctgacgacagcaacatagacaagatcgccgctgataccagcgtggaggctaaggcatcgtcggagttcatcaagatgcacatgcacgcgaccacatctctcaagatggacctgtccggatcgctctccatactcgtcggtatgctcctaccgttcctccaagagccgttccggcaagtgctcaagaggattcccggcatgggggactacaagatcgaccgggtcaaccgcgcgctgaaaacacatatggacagcatcgtcgccgagagggaggcggcaatggagcacgatcttgcggcgtcgcagcagcgcaaggacttcctgtccgtcgtgctcacggcgagggagtctaacaagtcatcgagggagctgctcacgccggactacatcagcgcgctcacctacgagcacctcctcgccgggtcgaccacgacggcgttcaccctctccacggtgctctacctcgtcgcgaagcacccggaggtggaggagaagttgctcaaggagattgacgcgttcggcccccgctactgcgtgccgatggccgacgatctgcagaccaagttcccgtaccttgatcaggttgtgaaggaatcgatgagattctacattatgtcgccattgctagccagggaaacacttgaacaagtcgaaattggaggatatgtcctcccaaagggaacgtgggtgtggttggcaccaggagtgctagcgaaggatcctaagaacttcccggagccagaaatattccggccggaacggttcgaccccaatggcgaggaggagaggaggaggcacccgtacgcgttcatcccgttcgggataggaccaagggtgtgcatcggccagaagttctccatccaggagatcaaactgtcaatgatccacctctaccgccattacgtgttccggcactcgcctagcatggagtcccctctcgagttctag

SEQ ID NO: 46 - DNA, 3839 bp, Oryza Sativa
gcttcaccccaaatccctcaacggcagcaagagagagaaagaagagagagagagagagagagagagaggagtagacgtcgcccatggcggaagaggaggaggtggaggaggggaggtcctcgtcgtcggcgatactggacctgccggagccgctgctgctgcacatcctgagcttcctgacggacgtgaggtctcggcacagggcggcgctggcgtgcgggaggatgcgggcggcggagcgggcgacgaggtcggagctctcgctgaggggcgacccgaggtcgccggggttcctgttcctctcgcacgcgttccgcttcccggcgctggaacacctcgacctctcgctcgtctcgccgtgggggcatccgcttctctcctccgtgccgccctgcggcggcggcggcggcggcgcgccctcggcgtcgtcgtcgtcggggatgaacgtgtaccaccccgaggcgatctccgagcagaacgccttcatcgccgcccgcctcgcgggctgcttcccggcggtgacctcgctcgccgtctactgccgcgaccccaccacgctcgccaacctcaccccgcactggcaggcctccctccgccgcgtcaagctcgtgcgctggcaccagcgcccgcccaccctccccgacggcgcggatctcgagccgctgctggagacctgcgccgcgctccgggagctcgacctgtcggagttctactgctggaccgaggacgtcgtgagggcgctcaccacgcacccttccgccaccgcggcgctcacccacctcgacctcggcctcgccgccgccaccgacggcttcaaatcctccgagcttgggccaatcgcggcctcctgccccaacctccgcaagctcgtggcgccatgcttgttcaacccacggttcagcgattgcgtcggcgacgacgcgctgctctcgctggccaccagctgcccgcggctgaccgtcttgcggctcagcgagccgttcgaggctgcggccaacatccagagggaggaggcggccatcaccgttgcggggctagtcgccttcttcgcggcgctccccgcgctggaggatttcaccatggatctccagcacaatgtgctggaggccgcgcccgcgatggaggcgcttgcccgaaggtgcccgcggatcaagttcttgaccctgggttccttccaggggctgtgtaaggcctcttggttgcatcttgatggtgttgcggtgtgcggtgggctggagtcactttacatgaagaattgccaggatctcacggatgccagccttgcggcaattggccgtgggtgccggaggcttgctaagttcggcatccatggctgtgaccttgtcacttcggctgggatcaggaggcttgcattcacgcttcggcctactctcaaggaagtcactgtcttgcactgccggcttctgcacactgcagaatgtctcactgctctaagtccgatccgtgatcgcattgaaagtcttgagatcaactgtgtctggaacacaaccgaacaaccctgcagtgttgcaaatggcaccaccaccgaatgcgatcctgaggatgatgagcttggtgaagtgtacgagtctgcagccaagaaatgtaggtacatggaatttgatgatcttggaagctgggagatgctcaggtcactctccctatggttctctgctggccagcttctctctccgctcatttctgctggtctcgatagctgtcccgtgcttgaggagatctcaattaaggtggagggtgattgccggacatgcccacgacctgctccaagaacaatttttggcttaagtgatcttgcaggcttcccagtattagccaagatgaaattggacctcagtgaagctgtgggttatgcacttactgcaccaacagggcagatggatctttcactatgggagcgattttatttgcatggtatcgaatcactgcagactttgtatgaattggactactggccgccccaagacaaggatgtgcaccaccggagcctgacattgccagccgtgggattgatccaacgctgcgttggactcaggaagcttttcatccatggcaccacacatgagcacttcatgaccttcttcctttcaattccaaacttgcgggacatgcagttgcgggaggactattatccagccccagagaatgatctgatgttcacagagatgcgggctgaatcttggcttaggtttgaggtgcaactgaacagccggcaaattgatgattagttatgtgggcacaaaatggtttgaagctgaatacagagatttatctggatggtgccattgctccactgtgcaatggcaggggattcctggcttggtgacaaatgggatggcgtgtgcagatgtgcaagccagttttgcatgtcattatcgggcatgttgagttgcaacaccggctacaacaaggattgaaagctgctttagtttccaaggaacaaccaatcagttccatcagaactgactaccaccatttgctgattcgttctctgcagtgatccccaatggagacctggcctttgcttcatctcatcctcaaactgtagcatgacaagaaagacgtgcggaacaagatcagcatcagaacatgacaaaaagattttcgcactagaagccggtttatccaattcctctgcttgcctcttccattcagctagttaagataatgcgagatcactggttttgtcaaagcaaatccagacgattcttggtgccatggaaaaagaagtcgtccatgagtgagagagctctcttgtcctaatccatcagcaagggcaataatgcttttttgattaagcagctggaggcctcacaaaataatgcttaagcaagtactactacaggattaaaagctggcctctagaaggagtagattaggtagaggagaagcttctcctttcctcttttgccacgttgaggcttattgctcacatgattgtcaatcaaccacgtcacacaagcacatacacacacttattatttgctcatagttttagttatttatcaacatttggcagatatgtgttggaaattcagatgctccttgatgccattttatcttgctgaatgtcttgaaagcaaagctggtgacaggagagatgtcatatgagcaggcagtcagttgcagccttgtggttgcacctccctttcctgctgtcctcttttttttgttttccctggtttctcttcatcagaattaaagcagatatttttgtggcggccgtggatttccattcatctgatgatcagctagtaatattctgcaagtgccttccgatagaattgagcgatgattctgaggtcagatactcatcagatgctcgaaggataagtgggtttcagacgatgctgcaaaagatattagccggcgagtgaggtgaggctactagcctactaggcttatcgccttgtataaaactaaaggagtcagtacagagacatcaggtaaagtcagcatatgcagctatccatctatgcatgcatgcaccaactgcaaagtaaaggtaaaagtgaaagctttgtcttccaggtgtatggaagaaaattatccttgtgatggttatgcaactcactcttttgtttgcacccagatatgtcatattggctttttcaccatggtgtcaaggttgatgtgaatgtgaatgtgattctactaatttgaggtcatgtagagtaattaagtaagcaaatggagcccgtcatgtcgtcatgcactgacaaggatatagtcctatggacctctattttgattaattggtggagaaaattcagaggaaaaatatgtgtgtgctggaatatgttggtattttttttttacaa

SEQ ID NO: 47 - DNA, 2494 bp, Oryza Sativa
aacgaccgaaggaggccaagtccaaagatggcaacacaagcgattgcaccgatgcacgccgccgtcgtgcaccgccaccacgttctaccaccccgccgctgcgtgcgccgccgtggcgtcttcgtccgcgcctcggccgccgccgccgccgccgccgccgagacggacacgctgtccgcggccttctgggactacaacctcctcttccggtcgcagcgcgacgagtgcctcgactccatcccgctccgcgtcaccgagggcgcgatcccgcccgacttcccggccggcacctactacctcgccgggccgggcatcttctccgacgaccacggctccaccgtccaccccctcgacggccacggctacctccgctccttccgcttccggcccggcgaccgcaccatccactactccgcgcggttcgtggagacggcggcgaagagggaggagagccgggacggcgcgtcgtggcggttcacgcaccgggggcccttctccgtgctgcagggcgggaagaaggtgggcaatgtgaaggtgatgaagaacgtggccaacaccagcgtgctgcggtggggcggccggctgctctgcctctgggagggcggccagccgtacgaggttgacccccggacgctcgagaccgtcggcccgttcgacctgctcggcctcgccgccgccgacgacaacaaggcaacgaacgcgtctgcagcacgacggccgtggctgcaggaggccggcctcgacgccgccgcgcgcctgctgcgccctgttcttagcggggtgttcgacatgccgggcaagaggctgctggcgcactacaagatcgacccgcggcgggggcgtctgctgatggtcgcctgcaacgccgaggacatgctcctcccgcgatcccacttcactttctacgagttcgacgcccacttcgacctcgtccagaagcgtgagttcgtcgtgccggaccacctcatgatccacgactgggccttcaccgacacccactacatcctcctcggcaacaggatcaagctcgacatccccggatcgctgctggcattgacgggcactcacccgatgatcgcggcgctggccgtggacccgagaaggcagtcgacgccggtgtacctgcttccgcgctccccggagaccgaggcgggcggccgcgactggagcgtgccgatcgaggcgccgtcgcagatgtggtccgtgcacgtcggcaacgcgttcgaggaggcgaaccgccggggcggcctcgacgtccggctgcacatgtcaagctgctcctaccagtggttccatttccacaggatgtttggttacaattggcaccacaagaagctggacccgtcgttcatgaacgcggcgaagggaaaggagtggctgcctcgcctcgttcaggtggccatcgagctcgacaggacgggagagtgccggaggtgctcagtcaggaggctgtccgatcagcacgccaggccggcggacttcccggcgataaacccaagctacgccaaccagaggaaccggttcgtctacgccggcgccgcgtccggctcccgcagattcctcccgtacttcccgttcgacagcgtggtgaaggtcgacgtctccgatggatcggcgcggtggtggtctaccgacgggcgcaagttcgtcggcgagccggtcttcgtcccgaccggcggcggagaggatggtggctatgttcttcttgtagagtatgcagtctccaagcacagatgccatctagtggtgctggatgcaaagaagatagggacagagaatgcacttgtggcaaaactagaggtgccaaagaacctcacttttccaatgggattccatggtttctggggagatgaatgagcatagagcaagcatcagatccagtctaactctggagagaaattgtcttgaaaaggcaagaattttgcctcgtgtattgataaaagagagttttgtgataatctgtacatggtggagaggaattatcaggggaaccaaataactactgtacatccagtctcggaatgaaaattcgtctcaccaattcattaaaatcctgaaatactaatgttttaaggcaataattcatagtattcccatagggtaaacatataagacctccactgagaatcttgatgtcttggcaattttaaaatgaaagttcttgaactgacaactaagaatgataccatccatgatcttaacccattcgacaagaatttaaaaggctagaacatatcctgtacacagctaacagaccaccaaatgtgaagtcgacgaatttttggcatcacttaatgcgagccacagtcaccacaatgaagacgaacactgcgagcatgaaggacattctcactgtatcgtcatacaaatcatagtcctcactctgagcttgaaagagcatgttcacaagcttaagtatgctctcaaggaattccttgatctttgcttgggtggtttccatgacccacttcatcactccaggagaagcagaaga

SEQ ID NO: 48 - DNA, 2406 bp, Oryza Sativa
atgtctcccgctatgctgcaggcgtcgtcgctgtgcgtatccgcggcgctgtcaggcgccgcgagccggccgggccgcctggccagccaggggcaccagggcaagcgggccgtggcgcagcctctcgcggctagcgccgtgacggaggcagcgccgcccgcgccggtcgtcgcgccgccggcccgccccgtcgacgccccgcggcgccgtggcggacgtggcggcggcggaggcggcggcgagctcgtggcgtggaagagtgtacggcaggagaggtgggagggtgcgctcgaggtggacggagagctgcctctctggctggatggcacgtacctgaggaacggcccgggactatggaacctcggcgactacggcttccggcacctgttcgacggctacgcgacgctggtgcgcgtctcgttccgcggcggccgcgccgtgggcgcgcaccggcagatcgagtcggaggcgtacaaggcggcgcgcgcgcacggcaaggtgtgctaccgcgagttctcggaggtgcccaagccggacaacttcctgtcctacgtcggccagctggcgaccctcttctcgggctcgtcgctcaccgacaactccaacaccggcgtcgtcatgctcggcgacggccgcgtgctctgcctcacggagaccatcaagggctccatccaggtcgacccggacacgctcgacacggtcggcaagttccagtacacggacaagctgggcgggctgatccactcggcgcacccgatcgtgaccgacaccgagttctggacgctgatccccgacctgatccggcccggctacgtggtggcgaggatggacgccggtagcaacgagaggcagttcgtcggcagggtggactgccgcggcgggccggcgccagggtgggtgcactcgttccccgtcaccgagcactacgtcgtcgtgccggagatgccgctccgctactgcgccaagaacctcctccgcgccgagcccacgccgctgtacaagttcgagtggcacctcgagtccggcagctacatgcacgtcatgtgcaaggccagcggcaagattgtggcgagcgtggaggtgccgccgttcgtgacgttccacttcatcaacgcgtacgaggagacggacgaggaggggcgcgtgacggcgatcatcgccgactgctgcgagcacaacgccaacaccgccatcctcgacaagctccgcctccacaacctccgctcctccagcggccaggacgtcctccccgacgccagggtggggcggttcaggatccccctggacgggagccagttcggcgagctggagacggcgctggacccggaggagcacgggcggggcatggacatgtgcagcatcaacccggcgcacgtcggcagggagtaccggtacgcctacgcctgcggcgcccgccggccgtgcaacttccccaacacgctcaccaaggtcgacctggtggagaggacggccaagaactggcacgaggagggctccgtgccgtccgagcccttcttcgtgccacgccccggcgccaccgaggaagacgacggcgtggcgatatcgatggtgagcgccaaggacgggtcgggctatgcgctggtgctggacggcaagacgttcgaggaggtcgcgcgggccaagttcccctgcgaggagaagcccatccgccatttgtcatccgccgaagatcaccggaaagtcatcgccggccatctccttcgccgttcatcgctgctttccgacgttccggaggagagcgtttttgttgaggaagctcctggtttggaatggtacatttctggtttggagatagatctatacagccggtggctggcgaacccggtggtcgtcccgaaggccaacggcaagctccggatgtgcatcgactacacggacctcaacaaggcatgccctaaagatcccttccctctaccacgcatagatcagatagtcgactccactacggggtgcgaccttttgtgttttctagatgcctactctgggtatcaccagatctgcatggctagggaagatgaggaaaaaactgccttcattactcctgtgggcactttttgttatacaactatgccttttgggttaaagaatgcaggccctacctttcagcgcatgactcgtattactttgagtaatcagatagggtgtaatatagaggcgtatgtcgatgacctggtggtaaagacgcgccaccaggacacgttgctgcaggatttggccgagactttcgacagtattaggtccacgcgcgtgaaactgaaccctgataagtgtgtgttcggtgtgccggcggacaaacttctcggttttctagtctcctcccgaggcatagaagctaatcccgagaaaatatgcgcgatagagaggatgcgcccccagcaagcttag

SEQ ID NO: 49 - DNA, 1052 bp, Brassica napus
tctacttccttcgactaaaattttaagtaaataaaaaccttatcctttctctctcttctgccattgctattcatacaagtctatgactgagatttgatttgaggatccgaccaagaagtttgtgagacagaaccccagaagccaagatcttcaaaccgctaagaaagtccgtgatctggtgatggcaggaggaggaccaactttctcaatcgagttgtctgcatacggaagcgatctgccaaccgacaaggcttccggtgatataccaaacgaggaaggaagcggtttaagtcgtgtcggaagcggaatctggtcaggacggacggtggattactcgtcggagagttcatcatcgatcggaactccgggagacagcgaggaagaagacgaagaaagcgaagaagacaatgatgaggaggagctagggttggcttcattgagatctctagaagattctctcccaagcaaaggtttatcgagtcactacaaaggtaaatcaaaatcgtttgggaacttaggagagatcgggagtgtgaaagaagtgccgaagcaagagaatccattgaataagaagagaaggttacagatctacaacaagctggcgagaaagtctttctactcatggcagaaccctaagtctatgcctcttttgcctgttcatgaagacaacgatgatgaggaaggagacgatggagatctgagtgatgaagagcgaggaggagatgttcttgcgaggagaccatcgttcaagaacagagcattgaagtctatgagttgttttgctctctcagatctgcaggaagaagaggaagaagaagaagatgagtgatcaataattcaaagattttttttctttgttcatagttttttcatataatttttatttggtggagcgaattaatcttatctttttattattaattcgggaaattaattataaattatgtcgactggaggaaattaatttagtgtgtgttcctttctttccgcttagctgtttcttgtccttttttcatctccacattatcgattctcacatatttatttttatt

SEQ ID NO: 50 - DNA, 1649 bp, Brassica napus
aattacattcatgttttccgaatgcttatttctgattccatgcaatatactgtagatagatagataatacgattgacacatcactaagctcctctctctatctcaaaaacatattacgaccttactaatatttaacattggtttccgacaaaaaacataaaccaaaaattaccaaatctctaaagagtgaggaggagcaatttaaaagaaaattgagggtgatcgtacgtcaactacaagaatcttatcttgtgcctactctcgacacaatagaaaacgaacccaactgattgatgcttgtgaataagttaaagtccccatcaaacctcttatcctgcgcacatgtcctctcttatcctgcgcatatacactgtccactcttatcgtgcgcacctggaaaacaaaagaagttttacacaaaactccaaaaagcaaagaatctgacccattcacatacgtttcacaaacaccatcatgcccaccacacgatcaaagaagagagtaagagaggagagagaagcatagaaaagagagagagagagaaacagggattgaagcaagaatcaaatggagagtgtagcagtgacatggagcagagaagaagagaaatcattcgagaacgcaattgctatacattgtgtagaagaagagataacagaggaacaatggagcaaaatggcgtcaacggttccaacaaaaacattagaacaagtaaagaaacattaccaaatccttttagaagacgtgaaggcaatagagaacggacaagtcccattacctcgttatcacagaaccggagacgaagctgcagaagcttctcctccgaacagagactgtcattcctccggtggaagcggatcaccggagaagaaaccaaaccacggagtctccgggacaaatggcggcggaagaagtagttcaagacatgagcaggagagaagaaaagggattccatggacagaagaagagcataggttgtttctgttgggtttggagaaatttgggaagggagattggagaagcatctcaaggaactttgtgatcacaagaacaccaactcaagtagcaagtcatgctcaaaaatacttcatcaggcttaactcgatgaaccgagatcgaagacggtctagcattcatgacatcacttctgtgaacaatcaagctcctgcggttacaggacaacaacaacaagtagctaaacctagaccagcacagccgcaaccgcatcatccgacaatggctggagtagggatgtatggcagtgcgcctgtgggacaaccgatcatcgcaccacctgatcatatgggttcagctgttggaacacctgtgatgcttccacctccaatgggagctcatcatcatcatcatcatcatccccatcatcttggagttgctccttatgctctaccggcttatccggttccaccgataccgcaacaacatccaacaccatcgactatgcactgagtacaagagttagtgaaaactgacactacattgtaatgtaaacttgtgtacatttatcaaattgaatagcgggcaataatgtacagcagaggaatctgtttttctcatttcagtgatctatgatcttttaaggaatttttagtacatttcttgaaaaaaagattttaataataatttatgtt

SEQ ID NO: 51 - DNA, 2291 bp, Brassica napus
agagaaaattaaaaaaaaagtttgtgcaagcaagcaagcaagagcaaggagaagagagcgagagaatctctcagaatctgggtattgagctcatctcttcatcttcttccagtttccaatttcaatttcagaaatttagggctctttttgttttctttgctgcatttcgacttatcttatttttggtaagctcgatctctctgaaatcttctattctcggaaactaattgtctctctttttgatgttaaatttgcaaatccgagtgtgtatgatcgctctttggaatcgtaagagagatccaattacttagagatctggtgattggattgttagggttgttatttcgaattgctatttttaagctctatcatagcaagaatcgggagaattaagattgaatagagtttggtttgactcataataaactttatattgctttgcagtttgtttcaaattcttgggtagtagatttaatattagctctttttgtgtagaaaatggatggatcaggaggaggtagaggtggcggcgtggaatcgattctaccaaattacaagcttggcagaactctcggtatcggttcctttggcagggttaagattgctgagcactctttgaccggacataaagttgccatcaagatcctcaaccgtcgcaaaatcaagaacatggagatggaggaaaaagtgaggagagagattaaaatcttgagactctttatgcaccctcacatcatccgtctctatgaggtcattgagactcccactgatatctatcttgtcatggagtatgtcaactctggtgagctttttgactatatcgtagagaagggtagactacaggaggacgaggccaggaacttttttcagcagataatatcgggagttgagtattgccatcggaatatggtagttcacagagaccttaagcctgagaacttgcttttggactccaaatgcaatgtgaaaattgctgattttggcctgagcaacattatgcgagatggtcattttttgaagacaagctgtggtagtcccaattacgctgctccagaggtcatttctggaaaattatatgctggccctgaagtagacgtctggagttgtggtgtgatactctacgctcttctttgtgggactcttccgttcgatgatgagaacattcccaacctttttaagaagattaagggaggaatatatacactaccgagccatttatctggtggtgctagagatttgatcccgaggatgctcgtggtagaccccatgaaaagagtaaccatacctgagatccggcaacacaattggttccaagctcatcttccaaggtatttagctgttcctcctccggatacggtgcagcaggccaaaaagattgacgaggagattctccaagaagttattaatatgggatttgacagaaacctactcattgagtctctccgcaaccgcacccaaaatgatgggactgtgacatactatctgatactggacaaccggttccgtgtctctgctggttacctaggggccgagtttcaagagactatggaaggtactccgcgaatgcatccagcagaaagtgtagcttcaccagttagccatcggcttccaggactgatggagttgcaaggagttggcttgagatctcaataccccgttgagagaaaatgggctcttggacttcagtctagggctcatccacgtgaaataatgacagaggtcctgaaagccttgcaagatttgagcgtgtgttggaagaagatagggccgtacaacatgaagtgcagatgggttcctaacaacgcagatggaatgctaagtaactcgatgcatgataacaactactttggcgatgactccagcattgtagaaaacgacgcagctgttaagtctccaaatgttgtcaagtttgaaattcagttgtataaaacacgggacgacaagtatctgctggatctgcagagagtacatggtcctcagttcctgttcttggatctctgtgctgcttttcttgctcagctccgagtcctctgaataactcaaccggatcgcttcaagaataatcttcccacttccctttgtttctccttctaagaaatgttcacaaagacattaaacgtttaacttctttcagtttcttactttttttttttgtttgtttttggactcatctaaaatacctcgtttaatttataatgtaagaccggacaactcgagtaaaagaaataaccaggagcagctttgtacataatttatagttttaagtttctcgacttatatatatgatattt

SEQ ID NO: 52 - DNA, 1359 bp, Oryza Sativa
gctgtcgttgctcttatcctatcctacgtttgttgctcggttgcttctcttctttcctctctgtcttctgtcttctcttcttcttcctcaccaaagttgttgagttggtgtcctgttcttggacggacaagggtgtttatccaaaagaaatccatcccgagatttgcttctcttgcgcgcacactggcaccgtccggatcgctgaatcttgctggtggtggtggtggtggtggtggtggtggtgcacggccatgtcgacggcggtggcggacgtgccaccggcggcggcctacgggttccccggatcggccaagagagggaagcctgaggaggtggtggtgctgatggggaagaggaggaacgaagggttcttcatcgaggaggaggaggaggaggaggaggtgctgacggagagctcgtcgatcggcgcgccgtcgccggcgagctcgtcgatcggggagaactccggcgaggaggagggaggggacgacgaggaggaggtggagagcaagctcaaggcggaggatgagcaggtcggcctcggctgcttggacgccttggaggaatccttacccatcaagagggggctctccaacttctacgccggcaagtccaagtcgttcaccagcctcgccgaggcgacggcgtcgccggcggcggcggccaacgagctggccaagccggagaaccccttcaacaagcgccgccgcatcctcgccacctggtcgcggcgagcctcctgcagctccctcgccaccgccacctacctcccacctctcctcgcgcccgaccacgccgtcgccgagggcgacgagggtgaggaggaagacgacgattcagacgacgatgagcggcagcaccgtggcaagaacggcggccggcgagagtcggcggcgccgccattgccattgccgccgccgaggctcaccttgcacacccagatgggaggaatggtgaggaggaatggaacattcaggtcgccgaggtcgctctcactgtctgatcttcagaacagtggcggttcatgttagtttgctgctattagtacaaaaaaaataataatttttacagttagagcaaaaagccattgatctccttttggctggtagagttgttactgctacaactgcttactattagtaactatataattataattataattgcaatgcataaggtccaagtttgttgtgatctactatgattctagtaactctctggtttttctgagtcctgacctgattaagaagacatgtatcaactatgtatatctatgaactgacctaacttgaggctatcattaactaatgatggtttatgattagtcaattgctttgcttttgatgatctctctttcta

SEQ ID NO: 53 - DNA, 1704 bp, Oryza Sativa
ggaacggctgtttcttttttagttttattttttttatttcaccctatctcttccttgcgtctactacatatatgcacatggggaagagaggggaacttaacttggatacttgcctttgccttccaaaatctggagtccaaaaatacacaggagataagcagccatttgctcctggaagaatgagagaagcttgcgcgccggtgcctcctggggctcatgaggaggcctgcatagagcaaagtgatgatcgatctgaagatggttccttctcgggttcgtccatcgggtcgtcgtgctcatcggcatcggatctgagtgatgatgggagttcttaccgtcctggtgattatcttgagccgtcatcgtcgtcgtcatcagcatcttcgagcacattgcagctggattctgaagggccgctctgtgacttgtcctcactgatagcccagcttcctatcaggagagggctgtccaactattaccaaggaaaatcccaatcattcacatcgatatctgatgctacatgtgttcaggaccttgcaaagaaaattacctacaataagaggatgaaggcgtgcaaaagctatgcagcaggactagacatgaatcaacgatcaaatcacttgccaaagccatgcaacaagatgatagcgaagaggccctcgaaaggatcatttacctgtctgctgtcaagaccaagcagcaccagcctcctgtgcagcagtgctaaaccacctacacaccagagcaagaaagatgtacaaatgcatattaactcgtaacaaaaaatatgaccctggaaagtggaaacaaacaagtactagggtttcaggtatccagtttcagctaacatgttgtgctgcgcttgtactgctccttttcacaaggaaactcaactattttttttcttctgggatcaacctggcttcttacatttccttaagtccatccatttgaaattcaactactaaaaacgggtggaatgaaatacagctagctaataagcaaaatcctatcagctgggaactagagtactcttgcattacatgatcgagcaacaactagcaatgctttgtgcagcgcagctatacaggtattctacagaaaaacaaaattggcatgaatttgacacgtttgctcagagcaaaggaacactaatagtctcacataaaattttcactagttgcaaattgcactttcttgatgtttgttttcttgacatcacagatgggctggtctgattttatttccaacacacctccataaatgagatctgtgaagtgtgaacaacaaaaggatgagtttcatgctatttaaatttaaacaaaaggacaaatggttctcacacaatccaatgtaaatagagtaacgtaatctaaatttaaaaaaatacattacctgaaggaagtagcaaactttccatccacacccatatccctttcaaaagtttaagggtacagtaatttctcttccagcccaaaaggacggtggtatgaagtttgttttcttacatgcttcaaaatagacatgtccaatgtggaatccttgtttgttttcctttttgtgcatcacatatgcatgtcatttcttcttatctcaagcttatcaccaagcttttgcttaagaatggttaagtaaatatgttgcttagccatcttgtgtagtctcccacagcatcaagatcagactgcataggagaaacaattt

SEQ ID NO: 54 - DNA, 1267 bp, Oryza Sativa
gtctctctctctctctcccccaccatccaacacgccgccccctgctgctccaagcttatcctctccttctctctcctctctcctctctcctctcctctctctctctctctcgctgagattgatcgatctcgctcgctgtggcggctgctgctgggctctgatccgtttgatttggtggtgcgctcgccggaggaggaggaggaggatcttgatttgtgtgtttttttttggggcgcatgtccacggcggtggcgcgcggcgggatgatgccggcggggcacgggttcgggaaggggaaggcggcggcggtggaggaggaggaggatgaggtgaacgggttcttcgtggaggaggaggaggaggaggaggaggaggaggaggcggcggtgtcggatgcgtcgtcgatcggggcggcgtcgtcggacagctcgtcgatcggggagaactcgtcgtcggagaaggagggggaggaggagggggaggaggtggagagcaaggcgaaggaggtggcggtggaggtggagggaggggggctcgggttccatggattggggactctcgaatccctggaggacgcccttcccatcaagaggggactctccaacttctacgccggcaagtccaagtcgttcacgagcctggccgaggcggcggcgaaggcggcggcgaaggagatcgccaagccggagaacccgttcaacaagcgccgccgcgtcctcgccgcgtggtcgcggcggcgcgcgtcctgcagctcgctggccaccacctacctgccccctctcctcgcccccgaccacgccgtcgtcgaggaggaggacgaggaggacgactccgacgccgagcagtgcagcggcagcggcggcggcaaccgccggcgcgagccgacgttcccgccgccgaggctgagcctgcacgcgcagaagagcagcttgacgccgaggagctcgaatccggcgtcgtcgtttagatctcctaggtcattctcactatccgatctccaaaatgcaggctcctataactagctcaagaaaaaaaaatctaggtttctgcttcttctcttgtctgaaaattttaggggtgtgagagaaatcatcagtgttgttgttactgctgctgctgctgctatatgatcaagatatatataacaaaaaaaaagaactccatttgtttgtgtgcttgtctctggatgaactctgatcttgatgatgatgatgaatcttgtctgtctggcatgaggtcaacaactcaacattgctatgaacaaaaa

SEQ ID NO: 55 - DNA, 1062 bp, Oryza Sativa
attacacaatctctcctctctctcgcctctcgctctctccaaatctgtgcgcggttgtgtgcggtgatccggggtgtcccgaccgcgatcagggccgtcggcttcgggtcggacggacggatgccggtggacgtcggccgcgccgcggcccgcgaggcggcgatgccggcggcgtgcagctcgtcctcgattgggaaggacagcgacgagtgctcgccgccggggaaggaggaggaggagggggaggaggtgcagagcgcgttcgtcgggggaggagggggcctcgcggggttggaggcattggaggaggcgcttcccatccgacgtagcatctccaaattctacaatggaaaatcaaaatctttcgcgtgtctcaaggaagctgtttcatcttgtggctctgcaaaggacatcgcgaaggcagagagcgcatattcgagaaaacggaagaatctccttgcatacagcatcatgtatgaaacttcacaggagacagcagcagaagtttatgaaactggaccccctaagaggcttgccagtctgagcagaaactctttggtgaccttggctagtagcagttccaggagcagcagtagtatcagcatcgaagaaaccgagctcactgagcagcttcattctcctccgtcgcttgctaatgatgaaaattctgcggtttataatgctccagcactacaattaggatcctgtgatcctaaaacatcatctgtgcctgtgaggtcattttcaatgatggatttgcgccgtctgcataggccaagatcctcatgtcgtctcaaagatcagaaaacgacagagtagcgtagtattcttgatgttttactggggctgctagtgtctttctgtattgtgaataaataaggggggagtttgatggtgttgtctgtgcctgcaagatgattggggctactgtgttgtatgtaaattagcatactacatactgatatcgatggcctaagccctaaggtgtatgtctgtatcatgcaaattaacatttgtaaattaactaaatcctctagtaccttatattatacattcttctgg

SEQ ID NO: 56 - DNA, 450 bp, Oryza Sativa
atggaggaggtggcgagcgaacgcatggcggcggtggcaatgacggtgacgtgggcatggcgatgccgcagcgaagggagatgcacggcctccacgccaccgccgacgaagaagctgacgacggcgacggccgggatgccgaacccccacccccaccagcgtgccgatgtcgatggccgggatgctcaacgaggcagagacgaggtcgtcgaggtggaggacccggcggcgcttgtagatgaagcggcggcggcggcatcctcgaggaaagggaaggcgacggcggtggaggaggaggaggtgaacgggttcttcgtggaggaggaggtgggggcggtgtcgaacgcgtcgtcgatcggggtggcatcgtcggacagctcgacgggagaactcgtcatcggagaaggaggggcattctcgtctcttcaagccactttccagagaaaatga

SEQ ID NO: 57 - DNA, 1263 bp, Oryza Sativa
actctctcgcgatttccctagtctttcggtgtgcgtgcgcgtgtgaaggcgagcaagcgagcgaaagcgaaagaagcagcaagcagcaagaggaggaggcggaggcggcctcctttgcatgtgaggagagagaggaggtgaggtgaggggggccatgtcgatcgcactggagagtgggcccgggctaggaggaggaggagggggcggcggcgggccccggttcggccgcgtcgcccgctgcgcctacgccgcctcgccgccgccggcgtcggtgggggcgcgcagctcgtcgtcggtggggagggacagcgacagccccgcggcggcggccaagtgggagtgggacggcgaggaggtggagggcggcgacggcgaggtgcagagctcgtacaaggggcccttcgacaccatggacgcgctccaggaggccctccccttcaggaaaggggtatgcaagttctacaatggcaagtctggatcttttgcaaagcttcaagattccgtgatcccatctccacctgagaaaagtcttccaaagccagaaaacccatcccctaggaagcggaaaggtcttcttccgttcagtttcaagtggggcaagccacagaacaaagaggtattccctgaagatgatgtgatcatcagccctacaaattgcaggagaatgacattgtcaccagctgcaacaagcagttcggggagcaacagcggcagtgatgatgaacactaccgctctccgaagctgcatacccgtcagccactccgaaggcccagcaatgccgccatgggtgtctttgcttctccacctgcacctcgtccaccgcaggtgttatcagctcatatgagatcacactcgatgcttgatctgcaggatgtgacagagtcgaccgccatggtttctcccagggacaagcgaaggaggaactaggaagggtggatcttgatgtgttgtcggtctggtccaaccgctggtgcccattttagactgcggaatccagtggcgaatgccgtcgtggtggtagggcgcgtgcaatgctttaggggggtggggggtgttttgcgaggtcaaatggactcgtattcatagagcttgctgttctccttatacttgatgtactgggatacatacagagaacctgagaaactgatgtcgttacctgagttggtgggctgcatgcgttgattacaggttgacttgtaaatgctgaactctgcttttgtcgattataattcaatcatgtggcctgctctattacattttgt

SEQ ID NO: 58 - DNA, 1144 bp, Oryza Sativa
agtggctgtggtggtggtggtgcgtggtcctcttctccatccagagacaatccagttcagttcagtttcctctctccctcctgtcctcacctcacgcttgacaagagagagagagagagagagagagagagagagagagagagagagagagagagagagagaaaggctgaactgagctgagctgatcgagctagtgtgcgagacggcatggaccgatacggcgagaagcagcagcagcagcagatgtttgcctcctacgtggacgcctccctcctagcagccagcggtgaggtgcagggcgagaggccgagagcgcggaggaggaggaggcgtggggcgaggtgcgttggcggcggcggcggtggtggcgaggtggacggaggggacccgaagaagcggcggctgagcgacgagcaggtggagatgctggagctgagcttccgggaggagcggaagctggagaccgggcggaaggtgcaccttgcctccgagctcgggctcgaccccaagcaggtggccgtctggttccagaaccgccgcgcccgccacaagagcaagctgctcgaggaggagttctccaagctcaagcacgcccacgacgccgccatcctccacaaatgccacctcgagaacgaggtgctgaggctgaaggagaggctggtggtcgccgaggaggaagtgaggcggctcagatcagcggcggggagccacacggcctccggagaaggcggagacatcatgggcttaggcggcagcggcgcctgcgtcgccgggagcccgagctcgtcgttctcgacgggtacctgccagccgccgagcttcggcggcggagatcacctcggagacgatgacctggtgtatgtcccggagtacggcggctacgctgataacagtgtggttgagtggttcagcctgtatggattgatctaacgaagatcaagttgatgatggcatgtgcggggaatttagttagtcatagtgttaattaagctgtatggtgatcgatcgaactgatatggtcagctctaagtgtgtgtgtttaattatgtacataaagtgattaatggcaaaacctggccagctagctagtaatgtattaatattagtagttcgcttaaaaaagatcagatgtgtgttcatatca

SEQ ID NO: 59 - DNA, 1494 bp, Oryza Sativa
atgggcaaggcggcgcggtggttccgcaacatgtggggaggagggaggaaggagcagaagggcgaggcgccggcgagtggggggaagaggtggagcttcgggaagtcgtcgagggactcggcggaggccgcggcggctgctgctgcggcggcggcggaggcttccgggggcaatgcggcgatcgccagggcggccgaggcggcgtggctcaggtcggtgtacgccgacacggagcgggagcagagcaagcacgccatcgccgtcgccgcggccaccgcggcggcggctgatgccgccgtggcggccgctcaggccgccgtcgccgtcgtgcggcttactagcaagggccgctcggctcccgtcctcgccgccaccgtcgccggcgacacgcgcagccttgccgccgccgccgtcagaatccagacggcattcagaggcttcctggcgaagaaggcgctgcgagcgctcaaggcgctggtgaagctgcaggcgctggtgcgcggctacctcgttcgccggcaggccgccgccacgctgcagagcatgcaggcgctcgtccgcgcccaggccactgtccgcgcccaccgcagtggcgccggcgccgccgccaatctcccgcacctccaccacgctcccttctggccccgccgctcgctggtacgccgctggctaaatctcgccgacgacatcgccatgtatatgttcgatgttgacgttgtgtgttggcgatggatgcagcaggagaggtgcgccggcgacgacacgaggagcgagcacggtgtggcggcgtacagccggcggctgtcggcgagcatcgagtcgtcgtcgtacgggtacgaccggagccccaagatcgtggaggtggacaccgggaggcccaagtcgcggtcgtcgtcgtcgcggcgggcgagctccccgctgctgctcgacgccgctgggtgcgcgagcggcggcgaggactggtgcgccaactccatgtcgtcgccgctcccgtgctacctccccggcggcgcgccgccgccccgcatcgccgtcccgacgtcgcgccacttccccgactacgactggtgcgcgctggagaaggcccggccggcgacggcgcagagcacgccgcggtacgcgcacgcgccgccgacgccgaccaagagcgtgtgcggcggcggcggcggcggcggcatccactcgtcgccgctcaactgcccgaactacatgtccaacacgcagtcgttcgaggcgaaggtgcgttcgcagagcgcgccgaagcagcggccggagaccggcggcgccggcgccggcggcggccggaagcgggtgccgctgagcgaggtggtggtggtggagtccagggcgagcttgagcggcgtgggcatgcagcgctcgtgcaaccgggtgcaggaggcgttcaacttcaagacggccgtcgtcggccgcctcgaccgctcgtcggagtccggcgagaacgaccgccacgcgttcttgcagaggaggtggtga

SEQ ID NO: 60 - DNA, 1512 bp, Oryza Sativa
gtggataaggctccctcccgccattcttaattactatacttatcgtacgccgccgccgtcgccggccgccgcacgtctcaccgccgcgcgccggcccagggaggaggaggcgagagtgcgagatccaccacccgatgacctcccaggcggcgacgacgacgaccacggcggcggcggcggcggcgtggaccagggaggacgacaaggcgttcgagaacgcgctcgcggcgtgcgcggcgccgccgcccgcggacggaggcgcgcccgacgacgactggttcgccgcgctcgccgcgagcgtgcccggggcgaggtcggcggaggaggtgcggaggcactacgaggcgctggtggaggacgtcgcggccatcgacgcgggccgcgtcccgctcccgcgctacgccggggaggagtccgcggcgccgcccgacggagccggagccgccgccgccgcgtccaaggacggcggacaccggcgcgacgagcgcaagggcggcggcggcgggtacgacggcggcaagagctgctccaaggcggagcaggagaggcgcaagggcatcccatggacggaggaagagcacaggctgttcttgctggggctggacaagttcggcaagggggactggcggagcatctcgcgcaacttcgtcatctcgcggacgccaacgcaggtggcgagccacgcgcagaagtacttcatccgcctcaactccatgaaccgcgaccgccgccgctccagcatccacgacatcaccagcgtcaccgccggcgatcaggtcgccgcgcagcagggcgccccgatcaccggccaccaggccacgggcaaccccgcggcggcggcgctgggcccgccgggcatgaagcaccaccaccaccaccacccgggcggcgcgccgccgcccatgcccatgtacagcgccgcgcccatgggccaccccgtcgccggccacatggtgcccgccgccgtcggcacgccggtggtgttcccgccgggccacgcgccgtacgtcgtgcccgtcggctacccggcgccaccggccaagatgcaccaatgacgcgccatggacggacatgagcagcatttcttcctcctcctttcttgatgtgaatcttgatttgttctttgtgtagtcgccggctcatcgtccctgatcatcttgttcttctcacaatctcactaatgtaaacatacatagatcagatgccaagagtgcagggattggggattaaaggcgaataagtaaagtattttgctgactgtttgcaagtgatcatcacgtacacccggtgaaagcttagctccaaatgtggatgtaattagcagcggccttccgtacgtggtggcgccgatcgatgatcttgcaggggttgcaattagggattgatttccattttgctgatgtaaatttgcctactgtctcattggaccaaaacatatctctctctctctctctctctctctctctctctgccatatatatatcagtgttgatgaatggattggtgttttcc

SEQ ID NO: 61 - DNA, 1708 bp, Oryza Sativa
acagctcaagcttacgcgggagctaagctgagctacagcgagcggcggcggcggccatggagtgggatctcaagatgccgccggcggcgagctgggagctagccgacgagctggagaacagcggcggcgggggtgtaccggcggcggtatcgtcgtcatcggctgcggttggtggcggcgtcaatgcggggggtggtggcaggcaggagtgctcggtcgacctcaagctcggcgggttgggggagttcggcggcggcggcgcgcagccgcgggtcgccgtggcgggcgagccggccaaggggaaggggccagcggccgccgccacgggagcagcagcagcagcgtcgtcggcgccggcgaagcggccgcgcggtgcggcggcggcggggcagcagcagtgcccgtcgtgcgcggtggacgggtgcaaggaggacctgagcaagtgccgcgactaccatcgccggcacaaggtgtgcgaggcccactccaagacccccctcgtcgtcgtctccggccgcgagatgcgcttctgccagcagtgcagcaggtttcacttgcttcaggagtttgatgaggccaagcgcagctgtagaaagcgactagatgggcacaaccgtcgccgcaggaagccacagccagatcccatgaactctgcaagttatcttgcaagccaacaaggggcaagattctcaccgttcgcgacgccgagaccggaggcaagctggacagggatgatcaaaaccgaggagagcccatactacacgcaccaccaaatccctcttggcatcagcagcaggcagcagcatttcgttggctccacctctgacggcggccgccgcttccctttcctccaggaaggcgagatcagcttcggcaccggcgccggcgccggcggcgtgccaatggatcaggcagcagctgctgctgctgcttcagtgtgccagccacttctgaagacggtagctcctcctcctcctcctcatggcggcggcggcagcggcggcggcaagatgttctccgatggtgggttgacacaagtgctcgactccgattgtgctctctctcttctgtcagctccggcgaactccacggccatcgacgtcggcggtggccgggtggtcgtccagccgaccgagcacatccccatggcgcagcctctcatctctggccttcagttcggcggcggcggcggcagctcagcctggttcgcggcgcggccgcatcatcaggcggccaccggcgccgccgccaccgccgtcgtcgtctcgacggccggtttctcctgcccggtggtggagagcgagcagctgaacacagtcctgagctccaatgacaatgagatgaactacaatgggatgtttcacgtcggcggcgaaggctcatcggatggcacgtcgtcgtctctgccgttctcatggcagtagttttttcagtaactgtatgttgctgccttagtttcagtagagttggttcttcatttcttttcagtgatcaaattattgtttctgttcttttctgccatggtaagttccttttttttttcttcttcttgccttcatttgagttaattacagcattgatttgtgtgaacaaaattcatcataaatcagttcctcgcgagatcattggtctcaacatgatggtgccaagtgagaactgcagtattgtgcagttttcagttttgagtctaagttgtataaacttgcag

SEQ ID NO: 62 - DNA, 1717 bp, Brassica napus
atacaagcaagcaagcaagagcaaggagaagagagcgagagaatctctcagaatctggaaaatggatggatcaggaggcggtagaggtggtggcgtggaatcgattctaccgaactacaagctcgggaggactctcggtatcggttcctttggcagggttaagattgctgagcactctttgaccggtcataaagttgccatcaagatcctcaaccgtcgcaaaatcaagaacatggagatggaggaaaaagtgaggagagagattaaaatcttgagactctttatgcatcctcacatcatccgtctctatgaggttatcgagactcccactgatatctatctcgtcatggagtatgtcaactctggcgagctttttgactatattgtagagaagggtagactacaggaggacgaggccaggaacttttttcagcagataatatcgggagtggagtattgccatcggaatatggtagttcacagagaccttaagcctgagaacttgcttttggactccaaatgcaatgtgaaaattgctgattttggcctgagcaacattatgagagatggtcattttctgaagacaagctgtggtagtcccaattacgctgctcctgaggtcatttcgggtaaactatatgctggccctgaagtagacgtctggagctgtggtgtgatactctacgctcttctttgtgggactcttccgttcgatgatgagaacattccaaacctttttaagaagataaagggagggatatatactctgcctagccatttatctggtggtgctagagatttgatccccaggatgctcgtggtggaccccatgaaaagagtaaccatccctgagatccggcaacacacttggttccaagctcatcttcctaggtatttagctgttcctcctccggatacggtgcagcaggccaaaaagattgacgaggagattctccaagaagttatcaatatgggatttgacagaaacctactcattgagtctctccgcaaccggacccaaaatgatggcactgtgacatactatctgatactggacaaccggttccgtgtatctgctggttatctcggagccgagtttcaagagactatggaaggtactccgcgaatgcatccagcagaaagcgtagcttcaccagttagccatcggcttccaggactgatggagttccaaggagttggcttgagatctcaataccctgttgagagaaaatgggctcttggacttcagtctagggctcatccgcgtgaaataatgacagaggtgctgaaagccctgcaagatctgagtgtgtgttggaagaagatagggccttacaacatgaagtgcagatgggttcctaacaactcagatggaatgctcagtaactcgatgcacgataacaactactttggagatgactccagcatagtagaaaacgacgcagctgttaagtctccaaatgttgtcaaatttgaaattcagttgtataaaacacgggacgacaagtatctgttggatctgcagagggtacatggtcctcagttcctgttcttggacctctgtgctgcttttcttgctcagctccgagtcctctgaataatcaaaccggaccgcttcaagaataatcttcccactttcctttgtttctccttctaagaaatgttcacaaagacattaaacgtttaacttctttcagtttctttcttttttgttttt

SEQ ID NO: 63 - DNA, 2086 bp, Brassica napus
agagagagagagagagtaaacttcttttcatttctctctctctttatcaatttaaagctccacgtttcttctcctcgctctcgctctcaatcgttcgtccagattctctctgtagtagatttatcactctctctatttcgattcgattccgcgatctgctcgggaacaaaggtgtaaactttgacttttttgtttggtttgttttgtaaagttaatcgctttcttcttcttcttcttctgctaatacctaattgatcagttccatggtgtctttgttcccttttgctaatgagtttctattttttgcagtttggtaaaaatggatccttcatcgaatagatttgggagtactggagtggaatcgatcttaccaaactacaagcttggcaaaacgctaggcattggatctttcgggaaggtcaaaatcgctgagcatcttctcactggccacaaggttgctatcaagatcctcaatcgccgtaagatcaagaacatgcaaatggaagacaaagtgaggagggagattaagattctgaggctgtttatgcatcctcatatcattcgccagtatgaagtcatagagacccctagtgacatctatgttgtgatggagtatgtcaagtccggtgagctctttgattatattgttgagaaaggtagattgcaagaggacgagggtcgtaacttcttccagcagcagataatatctggtgtggagtattgccaccgcaatatggttgtccacagagacttgaagcctgagaatttgctactggactcgaggtgcaatattaagattgctgactttgggttgagtaatgtcatgcgtgacggtcattttcttaagaccagctgtggtagccccaactacgctgcccccgaggttatatcagggaagttatacgctggacctgaagtagatgtatggagttgcggagttatattgtatgctcttctctgtggtacccttccttttgatgatgaaaacattcccaaccttttcaagaaaattaagggtgggatttacactcttccaagtcatttatcatctgatgctagagacctgatcccaaggatgctcgtagttgacccggtgaaacgaatcaccattcctgagatccgtcaacaccgttggttccagactcatcttcctcgttaccttgctgtttctccaccagatacagtagagcaggccaaaaagatcaatgaggagatagttcaagaagtggttaacatgggattcgacagaaaccaggttatggaatctcttcggaacagagtacaaaacgatgctactgttacatactatctgttgttggacaaccggttccgtgttccaagtggctatcttgaatccgagtttcaggagacaacagacaatggttccagtcctatgcgccccgctgaagcagctgcttcacctgttggccactgggttcctacacacatggatcagtacggattgggagcaagatcacatgtcccagctgaccggaaatgggctcttggacttcagtcccatgcacatcctcgtgaaattatgaatgaagtactgaaagctcttcaagagctcaatgtgtgttggaagaagattggtcactacaacatgaaatgccgatgggttcctggtttttctgatggtcagaatactatgggcaacgatcagatacactttagagatgaatcgagcatcattgaggatgactgcgccatgacctcactgaccgtcatcaaatttgaacttcagctatacaaagctcgagaagagaagtacttgctggacatacagagagttaacggtcctcagtttctcttcttggatctatgcgcagcctttcttaccgagctccgtgtgatctgaagcttttaaccatttgttaagacattttcatccatgtttcacggtttgtaatagtagagaagacaacatagtatgtggagggtgcagtgtttttattttgccaggttacttttatatattacctggattcaaagttaaactctactgtaatagttactatcgttcgtttcccccctttatgatggtttttaaggttggatcatctgtacatataagttgactgtt

SEQ ID NO: 64 - DNA, 1229 bp, Brassica napus
tctctctctctctctctctctctctcgctttcagatgggaaatgcgaacggcaaagaagacgacgccgtctctggcgtcgatggagatgccacatcatcgtcggcgagatctaacggcggcgatccttcagtccatagtcgtcaacgtcgtcctccttccacagactctatgagcagttctcctcccggaagccccgctcgatctccttctcctttcctattcgctcctcagctctcattgttatgtcaccttacatctaacgccattggctcaactatgcgtcacttcttccattgtttaggcttaacatgtgtacataatgactgcatttcgtgtcagatggttccagtggctccgttgcagagggcaaacgcccctccttcgcctaacaagatccattggaaccaatctcaaagagtttttgatcatctcgaagagccaggaatccctattatcattacatggaaccagggaggtaatgatgtggcagtggaaggatcatgggacagttggagatcaaggaagaagctgcagaaatctggaaaagaccactcaattctcttggtccttccatctggaatataccactacaaggtgatcgtcgatggtgaatgcaaacacatcccagatttgccctttgtatcagacgaaatggggaatgtctgtaacattatcgatgttcataactttgtgccggaaaacccagaaagcatagtggagtttgaggcgccaccgtcacctgatcatagctacggccaagccctcccaaccgcagaagattacacaaaagatccactcgcggtgccacctcagctgcatctaacacttcttggcaaaagtgaagaaacagccgtggccaaaaagccacagcatgtggtgctaaaccatgtgttcatagagcaaggatggactcctcaatccattgtagctttgggtttaacacacaggttcgagtctaagtacataactgttgtcctctacaaacccctcacacggtaaactgaaatgacgaaatcaaatgccacgttgtcttcttctgttcttctctcttcatctctcaaaaattgtgtgagaactttgttcatagcgagtgagtgcccaacagttcccgagtttattaaacttcttcttgccttgtttgctggctttatgtacaaagcttctcggttctcattgtaacaaagaagaaaatactgaaatgcattccccaataagacgttattataag

SEQ ID NO: 65 - DNA, 1291 bp, Brassica napus
gatcaagtttgtacgaaaagcaagaatctttaaaaaccaagtctttataaatcaaagtgtgtccgtaaaaactctgatcagatccggtttaataacacaagagagtatagattcgccatctgtaacactttttttttaattttattataataataaaagcccaccctccagagagaggttaagatagattagattacccttttcttttggttacagtgtgtgtgtgatatgggaaacgtgaacgcgagagaaaaagaagaagaagaagaagaagaagccaatagtaacaaccacaacgacgctgcgactcgctctcatcaaggctccgactttacaccctccgagcagctcatgggtggtcatcatcatcaccaatctcctcctcacagccctcgcgccactcaatctcctctcatgttcgctcctcaggttccggtgattcctctccaaagaccagaggaaatccacatccctaacccttcctggatgatgcaatcgccttacgaagaggcttccaacgagcaaggcatccccaccatgatcacttggtgccacggtggtaaagagatctctgttgagggatcttgggataattggaagtcaagaagtcggctgcagagatctggaaaagacttcacaataatgaaagtgcttccctcaggtgtctatgagtacaggttcatcgtcgatggacagtggatgcacgcccctgagctcccttttgctcgtgatgacgctggcaacactttcaaccttttggacctccaggactatgttcctgaagacattcaaagcatatccgggttcgagcctccgcaatctccagaggctagctacagcagcttgcttctgggagctgaggattattccaaagagccgcctttggttccaccgcatttgcagatgactctgctgaacttgccgccggccaaccctgacgtgccgtcgccgctgccgaggcctcagcatgtggttctcaatcatctttacatgcacaaggggaaaagcggtccttctgtggttgctcttggttccactaaccgctttttagcaaagtatgtaactgtggtgctctacaagtccctccagaggtgatgctaatcatcatctttacagggtcttaccttagtttggtgttttaatagttaaaactcatggagaatgggtgagggaatttattgtaaggccgacaaatctctgtttttttggttttggtttgtggcttttcaagtttgcacaacacttacctgcaagtctttatattattgttttggctttcaaatctagcaaa

SEQ ID NO: 66 - DNA, 465 bp, Brassica napus
atggaatcgtcgtcgtcgggaacaaattcgtcggcgattcaaacgtcttccaggtcagaggagaatctcatggagcagaggaaacgtaagaggatgctctcaaaccgcgagtcagcgaggagatcaaggatgaagaaacagaagctcctcgacgatctaacggctcaggttaaccagctcaagaaagagaacagcgagatcgtgacaagtgtcagcatcacgacgcagcactacttggccgtggaagcagagaactctgttcttagagctcagctcgatgaactcagccacaggctcgaatctctcaacgacatcatcggtttcctagagaataccaacggggtttgtccgaaccctctgacttgtccagagtcagatgacttcctcgtgaatcagatgaatatgaacatgtttcatatgatgaaccagcctctcatggcatcttctgatgctttgctgtattag

SEQ ID NO: 67 - DNA, 2340 bp, Glycine max
gcaccgtcttttgtcgcgtattagcataatcgctgacgcagatgcaaacatcgaaggagaacgcgatgctttgttcctcttttgttcttccccttcccaatcttcaactttagggttcctttaatctcgttattcctcttcactcccaagctccgttcactccaacaacactccggttgaaattggagcttgagaccctcactagctgggtgttggacatgaagctcctatttaaaattggcactctgctcctttaatatcctggttttcaagagtggacttacctctacgttaactgatttagaaatggatggaccagctggccgaggtggtgctggcctggacatgtttctaccaaattataaattgggaaaaacactcgggattggatcttttggcaaggtgaaaattgcagaacatgtgttgactggccataaggttgcgatcaagatccttaaccgacgcaagataaagaacatggaaatggaagaaaaagtgagaagagaaatcaaaattttaagattgttcatgcatcctcacattattcgactttatgaagtcatagaaactccaactgacatatatgttgtcatggagtatgtgaagtctggagagcttttcgattacatagtagagaagggtaggttgcaggaagatgaagctcgtaatttttttcagcagataatctctggggtggagtactgtcacaggaatatggtggttcatagagatttgaagcctgagaatttacttttggactccaaatgtaatgtcaagattgctgattttggcttgagcaacatcatgcgtgatggtcactttcttaaaacaagttgtggaagccctaactatgcagctcctgaggttatctctgggaaattgtatgctggacctgaagtggatgtctggagctgtggtgtaattttatatgcccttctttgtggcacccttccttttgatgatgaaaatattccaaatctcttcaagaaaataaagggtgggatttacactcttcccagtcatctatcacccggtgctagagatttgataccagggatgcttgtggttgaccctatgaggagaatgaccatacctgagatccgtcaacacccatggttccaagctcgacttccacgttatttagctgtgccaccaccagatacaatgcaacaggccaaaaagattgatgaggagatccttcaggaagtggtgaaaatgggatttgacaggaatcaattggttgaatctcttgggaacaggatacaaaatgagggtactgtggcatactatttgttattggacaaccgatttcgtgtttccagtggctatcttggagctgagtttcaagagaccatggattccggttttaatcaaatgcattccagtgaacttgcttcttcagttgttggaaaccgctttccaggctacatggaatatccaggagtaggatcgaggcaacagttccctgttgaaaggaaatgggcccttgggcttcagtctcgagcccatcctcgtgaaataatgactgaggttcttaaagctttgcaagaattaaatgtttgttggaagaagattggtcactacaacatgaagtgtaggtgggttgctggcattcctggtcaccacgaaggaatggttaacaataatgtgcatagtaatcattactttggagatgattccaacattattgagaatgatgctgtttctacttcaaatgtggtcaagtttgaagtgcagctttacaaaacccgggaagaaaagtatctgcttgatcttcaaagggtgcagggtccacagtttcttttcttggatctatgtgctgctttccttgcacagcttcgtgtcctctagagcgaagagcttaggctcaccagagacataaatatgccttgtgtttcatgtgaataagcttacattgtacatacaagtatcttttcggtccaagcttatcctctgttttctacccgtttatctgtgggtaaacattataatgagccaatcccaagtatgggatttgcttcgttaacaatggtgctcgactaggttttcctttctcttggtgattttaattttatcagtgtaatgaattatatggggaatgtcttaaaagaattagccccaactgacagtgatatatgtatggttatcaaccaaatgctgtaaacgactgttgccattggaagggatgtctaggctgcttctaacttttgcagattagtctttgttgtcctataaatgtaatttcatattactcgtgtatgaatgctatgtaacgactgtgttcatccgacgagccatttcgtagagtgcaaccgttcctatctcaattacttaacaaaa

SEQ ID NO: 68 - DNA, 2289 bp, Glycine max
cgcacgaaccaacaaacaaacaaacaatgctctcttcttccattttccttctcaatccaccactctaaccctcgcacgcttcgttcaattacaaaaatggacagatcaactggccgtggtggtggtggaagtgtggacatgtttctccgaaattataagttgggaaaaacactcggcattgggtcctttggcaaggtgaaaattgctgagcatgtacggactggtcataaagttgctataaagatccttaaccgccacaagattaaaaacatggaaatggaagaaaaagttagaagagaaatcaaaattttaagattgtttatgcatcatcacattataagactatatgaggttgtagaaaccccaacagacatatatgttgttatggagtatgtgaaatctggagagctctttgattacatagtagagaagggtcggctgcaagaggatgaagcccgtcatttttttcagcagataatttctggtgtggagtactgtcacaggaatatggtggttcatagagacctgaagcctgagaatttactcttggactcaaaatttaacatcaagattgctgattttgggttgagcaacatcatgcgtgatggtcactttcttaagacaagttgtggaagccctaattatgcggctccagaggttatctctggaaaattgtatgctggaccagaagtagatgtctggagctgtggtgtaattttatatgctcttctctgtggcactcttccttttgatgatgaaaacattcccaatctcttcaaaaaaataaagggtgggatatacactcttcctagtcatctatcacctggtgctagagatttgataccaaggatgcttgtggtggatcccatgaagaggatgaccatacctgagatacgccaacacccatggttccaagttcatctaccgcgttatttagcagtgccaccaccagatacactgcaacaagccaaaaagattgatgaggagattcttcaggaagtggttaatatgggatttgacaggaatcaattggttgaatctcttagcaacaggatacaaaatgagggtactgtaacatactatttgttattggacaaccggtttcgtgtttctagtggttatcttggagctgaatttcaagagacaatggattctggttttaaccgtatgcattccggcgaagttgcttctccagttgttggacaccacagcacagggtatatggattatcaaggggtaggaatgcggcaacagttccctgttgagagaaaatgggcccttgggcttcagtctcgagcccaaccacgtgaaataatgactgaggtccttaaagctctacaagaattaaatgtttgttggaagaagattggacactataacatgaagtgcagatgggttgctggcactgctggtcatcatgaaggaatgattaacaattctctgcatagtaatcattactttggaaatgattccggcattattgaaaatgaagctgtttctaagtcaaatgtggtcaagtttgaagtgcagctttacaaaactcgtgaggagaaatatctgcttgatcttcaaagggtccagggcccacagtttcttttcttggatctgtgcgctgctttcctttcacagctacgtgttctctagtgaagctcacaagtcgcaaaggagaccttgaggtgtcttgtgtggcatgtgaataagcttacgttgtacatatcaatgccctttcagtatgggtatatctatctgtttgtactttttagcatacccccagtttttatgggttatcatgattggggaaacctaaatatggaatttgctttccttaatcatggtgtctgactaggtctgtctttttaaaagtgaattgaattttcttgatcccgtgaaatccctgaggattttatgaaagcattcgcctccaacagagacatccatttatggtattgaattttgtgttgtaattgactacttatgtctgtcacttggaagccgaggggttgtttgcctaggctgcatcgaacatgagcttgcagataagcattttctccccgcttccctacttaattactgcctcctcttatggatgcatgttatttgacagtcatggtttattatgtattttagaatccatgtaaactgagtgagtatatttttcgggcagtcataatgagttatgattgacgaagctgcttgatccatgtggtggcatgtattgctatgtgatgactgatgagtatattttccgggaagacttaatgagttatatgattcaccaagctgcttgat

SEQ ID NO: 69 - DNA, 2127 bp, Glycine max
ttgtcgcgtattagcataatcgctgacgcagatgcaaacatcgaaggagaacgcgatgttttgttcctctttggttcttcgtccccttcccaatcttcaactttagggttcctttaatctcgttattcctcttcactcccaaactccgttcactccaacaacactctgatttagaaatggatggaccggctggtcgaggtggtgctggactggacatgtttctgccaaattataaattgggaaaaacacttgggattggatcttttggcaaggtcaaaattgcagaacatgtattgactggccataaggttgcgatcaagattcttaaccgacgcaagataaagaacatggaaatggaagaaaaagtgagaagagaaatcaaaattttaagattattcatgcatcctcacattatacgactttatgaagtcatagaaactccaactgacatatattttgtcatggagtatgtgaagtctggagagctgttcgattacattgtagagaagggcaggttgcaggaagatgaagctcgtaatttttttcagcagataatctctggtgtggagtactgtcacaggaatatggtggttcatagagatttgaagcctgagaatttacttttggactccaaatgtaatgtcaagattgctgattttggcttgagcaacatcatgcgtgatggccactttcttaaaacaagttgtggaagccctaactatgcagctcctgaggttatctctgggaaactgtatgctggacctgaagtggatgtctggagctgtggtgtaattttatatgcgcttctttgtggcactcttccttttgatgatgaaaacattccaaatctcttcaagaaaataaagggcggtatttacactcttcccagtcatctatctcccaatgctagagatttgataccagggatgcttgtggttgaccctatgaggagaatgaccatacctgagatccgtcaacacccatggttccaagctcgacttccgcgttatttagctgtgccaccaccagatacaatgcaacaggccaaaaagattgacgaggagatccttcaggaagtggtgaaaatgggatttgacaggaatcaattggttgaatctcttgggaacaggatacaaaatgagggtactgtggcatactatttgttattggacaaccgattccgtgtttccagtggctatcttggagctgagtttcaagagaccatggattccggttttaatcaaatgcaaaactcttcagttgttggaaaccgttttccaggctacttggagtatccgggagtaggatcgaggcaacagttccctgttgaaaggaaatgggcccttgggcttcagtctcgagcccatcctcgtgaaataatgactgaggtccttaaagctttgcaagaattaaatgtttgttggaagaagattggtcactacaacatgaagtgtaggtgggttgctggcattcctggtcatcacgaaggaatggttaacaataatgtagataataataatttctttggagatgattccaacatcattgagaatgatgctgtttctacttcaaatgtggtcaaatttgaagtgcagctttacaaagcccgggaagaaaagtatctgcttgatcttcaaagggtgcagggtccacagtttcttttcttggatctatgtgctgctttccttgcacagcttcgggtcctctagagcaaagagcttaggctcacaagagacataaatatgccttgtgtttcatgtgaataagcttacattgtacatataagtatcttttcggtcgaagcttatcctgtgttttctacccgtttttctgtgggtaaacattataatgagccaattctaaggcttcgttaacaatggtgttcgactaggttttcctttcacttgatgattttaattttatcagtgcagtgaagtatatggggaatgtttttaacagaattaccccccaactcacagtgatatatttatggttatcaaccaagtgctgtaaatgactgttgccattgggaagggatgtctaggctgcttctaacttttccagattagcctttgttgttctataaatgtaatgtcatattactcatgtctgaatgctatgtactgt

SEQ ID NO: 70 - DNA, 1239 bp, Glycine max
ctcagacaggagaagttgataagaacaaacaacaacgaaacccttctccttcttcatcttcttcttccctactcttactctctatctcatttctccttccgtcgtttctctcatccctcgcgagcgtgcattgcattgcattgctctctctctctctctctctcataacacgacgacgttgccaccgcgcaccgtcgattgcttccgtaagtagcctttcgcatgggaaacgctaacggcagagaagatggatccattcccggccccgccgatccctccgtcgccgaccccgccgcacgtggaactcacgcgccggactcccgccccccggttcgcgccttctcctccgattcaatggccaatagcccgccgcagagccctcgccgctccagatcgccgatcctcttcggtcctcaggttcctctagctccattacaaagaggtaatggccctccttttctcaatcaaatgtggcagaatgagtctcatggtattgttaatcaacttcctgagcaagggatccctgtcatgattacatggaactatggtggtaacaatgtggctgtggagggatcttgggataactggacatctaggaaggcattacagcgatctggcaaggatcactcaatccttatagtccttccaccaggtatatatcattacaggttcattgttgatggtgaagagagatttactccagagcttcccaatgtagctgatgagatgggacatgtctgcaatcttcttgatgttaatgattatgtgccagaaaaccctgatggtgtgtccgagtttgaagcaccaccctcccccgaatccagctatggccaagcatttccagctgaggaagattttgcaaaagagccgatggccgttccttcgcagctgcatcttactgtcctaggtatggagaaatctgacataggttcctcttcaaagccccaacatgttgtgctaaatcatgtcttcatagagaaaaatttggccttaaagtctgttgttgccctgggactcactcacaggttccagtccaaatatgtgacagttgtcctttacaaaccactcaagaggtgaaatatgtgacgcttgtcaattatataaacctttttttttcttttttctttttggtagcctcagtctgtaaagatgaaaatttaaataatactccttgacaggtggtatatgaagggcttatgtctatatatgcttgaggcttctgttcaaattgataaatta

SEQ ID NO: 71 - DNA, 1396 bp, Glycine max
gtaaccaacccatatcataaccgtactcactttcctccggttcgggctttttcagcccgtaaccttgcactgaatatcagtgttggcttggcatcctgccatgggaacaaacacaacgctcctttcccttgctgccccaccctcattcctttctctttccaccctttaattcctttcccagaaagaaagaacattattattatataacccactccctcccctttatctttctcttcccaccccccgcttttttttttcttttttcttcttctcttcttactccctccccctctctccctgcataacaacaacgatgggcaatgtcaatgggagagacgatgttaatggtactccatcgggaaccgaaggagaagaagaagaagccggagaagagggtggttctgacagtgtcgccgattgcatgtcttccaaccctggccatcgtgcgccttccgagttgatgggtcattctccccctgctagccctagagcaacccaatctccattcatgttcaccccacaagttccggtggttccgctacaaaaacctgatgagatgcatgctccaagcccttcctggatgcagactacatcaggatatgaggatatgtactgtgaactagggattccaacgatgattacttggagctatgatgggaaggaagttgctgtggagggttcgtgggataattggaaaacaagaatggctttacagagatcagggaaggacttcacaataatgaaggtgctgccatctggtgtataccaatttagatttattgtggatgggcagtggaggtacgcacctgacttgccttgggctcaagatgatgctgggaatgcatacaacattttggacttgcaggattatgttcctgaagacattggaagcatttctagttttgaacctcctaaatcaccagactctagctataacaacttacaacttagttctgaagattatgcaaaggagccaccattggttcctccatatttacaaatgacgcttcttaacattccgtcaacaaatatggaagtccaacctcttacatccagacctcagcatgtggtactcaatcatctttacatgcagaaaggaaagggtagcccttcagtggttgcccttggtacgactcatcggtttgtagccaaatatgtgactgtggtgctgtacaagtctttgcagaggtaaacaacataaattacatggactgtgtagtcttttaaacttgaagttaatatagcttcgagcagtacggttatgagtgagaaattctgagcatcataaggatcattacatgaaagtgaagattgtggtacatataatgcaattgcttgatggccattcatcatgcaattcagtttccattcttacatcatttgatgatgctattct

SEQ ID NO: 72 - DNA, 483 bp, Glycine max
atggcttcctcaagtggaacatcttcagggtcatctctgcttcagaactctggttctgaggaggatttgcaggcggtgatggatcagagaaagaggaagagaatgatatcaaaccgcgaatctgcacggcgatctcgcatgaggaagcagaagcacttggacgatcttgtttcccaagtggctcagctcagaaaagagaaccaacaaatactcacaagcgtcaacatcaccacgcaacagtacctgagcgttgaggctgagaactcggtgcttagggctcaggtgggtgagcttagtcacaggttagagtctctgaatgagatcgttgacgtgttgaatgccaccactgtggcgggttttggagcagcagcaacatcgagcaccttcgttgagccaattaataataatagcttcttcaacccgttgaatatggggtatctgaaccaccctattatggcttctgcggatatattgcagtattga

SEQ ID NO: 73 - DNA, 2235 bp, Oryza Sativa
ctctctccctctcctcctcctcctcctctcctctctcccgtcacgggcgcatctctctctctctctctctctctctctctctctccccgcacagccgcgccgcgccgccgtcgccttctcgggcgagggcgaagagcgagggctcctgctcgccgccgcccctccccctcgtccgcggcgcgccggaggtcaggtagaagatggagggagctggcagagatgggaaccctcttggcggttaccggattggcaaaaccctagggattgggtcatttggcaaagtgaagatcgcggagcatatattgactggtcacaaggtggcaatcaagatcctcaatcgccgtaagatcaagagcatggagatggaagagaaagttaaaagagaaatcaagatacttagattatttatgcacccacatatcattcgcctttatgaggtgatagacaccccagctgatatttatgttgttatggagtatgtcaaatctggagagttgtttgattacatcgttgagaagggaagactgcaagaggaagaagctcgacgctttttccagcagatcatatctggtgttgaatattgccatagaaacatggtggttcatcgtgatcttaagccagagaaccttcttttggactccaaatgcaatgttaagattgcagactttggcttgagtaatgttatgcgtgatggtcactttctgaagacaagttgtggtagcccaaattatgcagcacctgaggtgatatctggtaaactatatgctggccctgaagttgatgtgtggagttgtggtgttattctttatgctcttctttgtggtacccttccatttgatgacgagaatattcccaacctttttaagaaaataaagggtggcatatatacccttcccagtcatttgtcacctttggcaagggatttgattcccagaatgcttgttgttgatcccatgaagaggatcaccatacgtgaaatccgtgaacatcagtggttcacagttggtcttccgcgttatttagctgtgccacctcctgacactgcacaacaggttaaaaagctcgacgatgaaactctgaatgatgttatcaatatggggtttgacaagaatcagctaatcgaatcacttcacaagagactgcaaaacgaggcgacagttgcctactatttactattggacaataggctgcgcacaaccagtggctaccttggagctgagttccatgaatctatggaatcttctctcgctcaagtaactccagctgagacaccaaactcagccactgatcatcggcagcatgggcatatggaatctcctgggtttggcttgaggcatcatttcgcagctgacaggaaatgggcccttggtcttcagtctcgagcacatccacgagaaataataactgaagttcttaaagctctgcaagagctaaatgtttgctggaagaagattggacattataacatgaaatgcagatggagtcctagttttcccagtcatgagagtatgatgcataacaaccatggctttggtgcagaatctgctataattgaaactgatgacagtgagaaatcaacccacactgtgaaatttgaaattcagctttacaaaacaagggatgaaaaataccttcttgacttgcaaagggtcagtggaccacagcttctctttctggacctgtgctctgcctttctaactcagctgagagtcctttaattatgccgttgtctgcttcccaactgaacttcctgcagcataccgtggattgtcacgtttcatttaagatatgtacataatgaccataatcctccagtagataatatttcctggagtgtgtagacgttagaggctgccagtgatgtattttgacggtaattggccaaaccagaggtaacaggcaggaggcaaacctttctctgtttttttatttgccgttgttgttgttatatgacggtttagacttatctagagtccttgaaccactttgcttgtttacggtgatctttactagcctgattgcccagcctgagaatcacctctgtcgttatgaaagttgagcagttggcatactattgttgatcctgcattccttgacagatgaccgttggatacatgcagagctgttatctttttttttttcacatcataattactcagattggttacccatttgcttctgtatgtgttgactggaatgttaaataagaatagttccctcttgattatactagac

SEQ ID NO: 74 - DNA, 3135 bp, Oryza Sativa
ggggaattgagtggtgttttgtgctgattgggcgtgtggcggtgtggggatttggtagaggcgacgcctaaacactaggggagttgtcggctcccctttctcatgtttctcttagatctacgaatagagtttctcttctccataggagttgtgattggtcgctcaatcgttattttttttggtttgtcagttggtcgatcccactttcctcaagtttgatttctcgttaggaagatctttccgctcgagagattctgattccttttcgattccatcccgtccttgtatggacgggccgcagtatcggattagcaaatccatgtgaataacataagctagattaacttgtatggtatttccgtatttatatcccgatcctaccattcaccgaaagattttttttaaaaaaaaacttgtgtggtaaaaatatttgcctgtgttgtgctaattatgcgttagtttgatgaatgaatttttaccttgtatcttcatgcttactacatgtgtgcagtcatggtatcgagggaacctttttaaggctaacacactaggatttcatgatttgtctatctctttccaccaccaaggcaccaagctgatatcctggttgcagcagcaccatgggtggagaagatgaggttcacggagtgtaaaggtcatctagtgatgggggttctgatggcagggggatgacttggggcattttgggggtgaaggaaggctaggcacaaaccctcttgacaggacagcggtgggttatagatcatgtttaggtttgttctggtaggattcgatggtgccaatgcaggatggtatttatcgcacctggacaataaggttttggcaaacctttatagttagatttttggttctagaaagggaataagttaaacgttctgaggagcattgatgattcggaccacttgtgccgttaactctgcttctactgcactccagctcctagcgcataaagcttgtgtttccctaaatgtaaccaaccagttagagatgaagggttgttactatgaattgatatacatagctcatctttgaggtgaacatgttaactcgaacaattacatattgcatggtttctgtgacacaccgtatacatcatcctagtattatgaacaagctgtttagcacagcttggatcttgcgtcatgttttgcgttggttcaaagtgaaaatggatggaaatgctaaaggcggtgggcattctgaggcactgaagaactacaatcttggaagaactttaggtattggctcatttggaaaagtgaagattgcagagcataagcttacaggacacagagttgctataaagatcctgaaccgccgccaaatgagaaatatggaaatggaggagaaagcaaagagagaaatcaagatactgagattgttcattcatccccatatcattcgcctttatgaggttatatacactcctacggatatatatgttgtgatggagtactgcaagtttggagaactgtttgattacattgttgagaaaggcaggttgcaggaagatgaggctcgccgaatcttccagcagattatatctggggttgaatactgccacagaaacatggtggttcatcgtgatctgaagccagaaaacttgctactggattcaaagtataatgtaaagcttgctgactttggtttgagtaacgtcatgcatgatggccattttttgaagacaagctgtgggagtccaaactatgctgctccagaggtgatctctggtaaattatatgctggacctgaggttgatgtatggagctgtggagtgatcctttatgctctcctttgtggtactcttccatttgatgatgagaatatccccaacctattcaaaaagataaagggtggtatatatactctcccaagtcatttatctgctctggccagagatttgatcccaaggatgcttgttgttgatccaatgaagagaatcacaattcgtgaaattcgagagcatcagtggtttcagattcgccttcctcgttacttagcagtgcctccaccagacacagcacagcaagccaaaatgattgatgaagatacccttcaagatgtcgtaaacttgggttatggaaaggaccatgtgtgtgaatctctgcgcaatagactgcagaatgaggcaactgttgcatattatttactcttggacaatcgattccgagctaccagtggctatttgggagcagactatcaagaatctttggagaggaattttaatcgctttgcttcatcggaatcagcaagttcaaatacaaggcattatcttccaggaagcagtgatcctcatgccagtggtttgcgcccacattatcctgttgaaagaaaatgggctcttggacttcagtcacgagctcaacctcgcgagataatgattgaggtcctaaaggcacttcaagacttaaatgtctcctggaagaagaatggacagtacaacatgaaatgcagatggagcgttgggactcaggccactgatatgttagatgttaacaacagctttgttgatgactcaatcataatggataacggtgatgtaaatgggaggctacctgctgtgatcaagtttgaaatccagaccagagacgagaagtatctgctggatatgcagagagttacggggcctcagctccttttcctggacttctgtgcagacttccttaccaagctgagggttctatagtacccttgtgttggcttcagtgaaaaaccaaacctagggttttatcatgtgcggtttttcactgcaataatgaataaaggacaccatgtaaataggcagctgtgactttcttcccagtccttagacagcgaaggttgttgtttgagtgactagtgttgtgttaagcaccaaaatgttggttgttacagacttacatagtatatagatctttataagctatctgggtgggcgaatgcttgatttctaatttttgcaggctgcagctatactgctggtgatgccgcagtacaagcttttctttttgctcctgcacacggttattatacgtgtgcatggaaattttgctactgctaggaagaagctagtaagaatatcagccccttgctgccgggttgtggtataaatgtagatgacagcaaatttagtgg

SEQ ID NO: 75 - DNA, 2315 bp, Oryza Sativa
cccacttgcagcggctgaggtgggaatgggatgttcaagaagcaatccacttgcgcagcactagcccaccaccgcctccgccgaccccgatccccatccatcccgccagcgaccgagcagggtcgccgtcgttcgccgtcgtcctgctgcttccgccgcatccatcccggtgagcagtcacatcctccgccaccgccgcctgcgccgatccccatccatccctccagcgagcagggcgggcgccgtcgttcctcctgctgcttccgcccgcatccatcctggtcactgtgaaaatggaaggaaatgctagaggcggtgggcattctgaggcactgaagaactacaatctaggaagaactttaggtattggttcatttggaaaagtgaagattgcagagcataagcttacagggcacagagttgctataaagatcctgaaccgtcgccaaatgagaaatatggaaatggaggagaaagcaaagagagaaatcaagatattgaggttgttcattcatccccatatcattcgcctttatgaggtcatatacactcctacggatatatatgttgtgatggagtactgcaagtttggagaactgtttgattacattgttgagaaaggcaggttgcaggaagatgaggctcgccgaatcttccagcagattatatctggggttgaatactgccacagaaacatggtggttcatcgtgatctgaagccagaaaacttgctactggattcaaagtataacgtaaagcttgctgactttggtttgagtaatgtcatgcatgatggccattttttaaagacaagctgcgggagtccgaattatgctgctccagaggtgatctctggtaaattatatgctggacccgaggttgatgtatggagctgtggagtgatcctttatgctctcctttgtggtactcttccatttgatgacgagaatatccccaacctattcaaaaagataaagggtggtatatatactctcccaagtcatttatctgctctggccagggatttgatcccaaggatgcttgttgttgatccaatgaagagaatcacaattcgtgaaattcgagagcatcaatggtttcagattcgccttcctcgttacttagcagtgcctccaccagacacagcacagcaagccaaaatgattgatgaagatacccttcaagacgttgtaaacttgggttatgaaaaggaccatgtgtgtgaatctctgcgcaatagactgcaaaatgaggcaactgttgcatattatttgctattggacaatcgattccgagctaccagtggctatctgggagcagactatcaagaatcattggagaggaatcttaatcgctttgcttcatcagaatcagcaagttcaaatacaaggcattatctcccaggaagcagtgatcctcatgccagtggtttgcgcccacattatcctgttgaaagaaaatgggctcttggacttcagtctcgagctcagcctcgcgagataatgattgaggtcctaaaggcacttgaagacttaaatgtctgctggaagaagaatggacagtacaacatgaagtgcagatggagcgttgggtatcctcaggccactgatatgttagatgtcaaccacagctttgttgatgactcaattataatggataatggcgatgtaaacgggaggttacctgctgtgatcaagtttgaaatccagctttacaagagcagagacgagaagtatctgctggatatgcagagagttacggggcctcagctccttttcctggacttctgtgcagccttccttaccaaactgagggttctatagtaccccgtgttggcttcagtgaataaccaaacctagggttttatcatgtgcggtttttcactgcaataatgaataaaggacaccatgtaaataggcagctgtgactttcttcccggcccttagatagagaaggttgttgtttgagtgactagtgttatgttgagcaccaaaatgttggttgttacaggcttacatagtatatagatcttgataagctatctgggtgggcgaatgcttgatatctaattttttgcaggctgcagctatactgctggtgatgctgcagtacaagcttttctttttgctcctgcacacggttattatgcgtgtgcatggaaattttgctactgctagaaagaagctaggtaagaatatcagccccttgctgccgggttgtggtataaatgtagatgacagcaaatttagtgaaatatcaacaaatgtagtcgtatgatcatgctcatgtccccctatggagaatcgaggtatcct

SEQ ID NO: 76 - DNA, 1496 bp, Oryza Sativa
ctcctccctccccttcccacctttcttcctcgcgcaacagcagcggggcgggggcggggcgcggcttggcgcgacgccgagtggtgcatcccgtgatttcgccgacgtcttcgccgcccgcggggcggggggcagcagcaggaggaggaggaggaggaggggggaggcatggggaacgcgagcgggcgggaggaggaccccgcggcggcggccggggagggggacgtcgaggactcgtcggtccggtcctcggagcgcggcttcccgccgtacggcggagggggcaaccacgtgcggcgcgcgtgctcggtgggcgtcgtcgggggcggcgggggcgccggatcgccgcccgggagccccggccgctccctctcgccgcggatgttcgtgccccagacacctgtgcctccactccaaagagcagctgatgtaactccagtgttcaaccggatcttaatgaatgaacaagaagaggaatttgatggcccccctcaaaaggaaattcctgtcttgatcgtgtggacgcttggaggaaaaaatgtatctgttgaaggatcctgggataactggaaatcaaggaaacccatgcagaaatctgggaaagatcattcgctcctgttgatacttccatcgggagtttatcgttacagatttgttgtagatggagaaaggaaatgtcttcctgatcttccttgtgaaactgatatcatgggcaacgctgttaaccttcttgatgttcatgattttgtccctgaaagtgttgagagtgtggcagaatttgagcctcccccatccccagattctagctacagtatccaggcacccgaggaaaaggatttctcaaaagagccaccggttcttccatcccaactccatctgggtgttctcaactcacagaactctgatgaaagttgtgcacggccccagcacatagtcctcaaccacctcttcatcgagaaaggctggggtgcccatccgctggtggcccttggtctaacccacaggtttgagtccaaatatgtaaccgtcgtcctgtataagcccattgaacgatagcatagtcgcccccatgaagtcgaagttagcttgacaactcactgcggaaccaacaagggcgaggcctcgcttcctgtaaaagcacttcaggttcaggagtatttccgataacttgcaggaactttggttggtgttgtacatgatgtaccatcatgatgtctggcgccctggtttgtttacctccgaggggccaaagcatcatgagtttttacatatcagcatttcgttgttatcgatgctcaaggtatgaaatgtgtagaaaataccacttagaaccgtggaaatccacagaaatcttaggtgccagagttagatcttgtgatccatagattcttaattattttgaacgatgctgttgtttgttcttaatgtaataaaaacagaggtgctcattttactactactaggtgattttccaacctagtgctgttgttaggctc

SEQ ID NO: 77 - DNA, 1627 bp, Oryza Sativa
taaacttggccgatccaacggcgggggaaatccgccggaaattaaagccggcgccgcgagcgtgcgggcgtggcgcggcgtgcgagtcacgtgacccacgtgccaaactgcctcttatatcgcctcctcctcctcctcccctgcctccggcgaagcggccggcggctgaggcgagattcgcggcgaccacgtcggcgaggagcgcgagagtgggggccctcctcctgtccgccgtccgcattctcgtcgtgtctggtttgagctgctgctgctgctgctgccggtgggagttgggctgcttgcttgcttggtttgattggtggaggtgggaggagtactggagtaggcgagtagctgtgggttggggtcggcgagggatccgggcggcggggtatggggaacgcgagcggcaaggaaggggaggagaacggccacgtggcggcgggggccgccgccggagtggctggctcggcgggggcagcggcccgggctccgccgccgcttatgccgccggacgccgtgatgcgggagctgcctcccccggtgccctacgtcttcacgccgcaggttccagtagccccactgcatatacctactgaattttctcctgttttcaacaattcatggataaatgaatcggatgaatccaccaataaccatccccaggagaagggaattccaactttgatctcatggagtcaaggaggaaatgaggtgtttgtggaaggatcatgggataactggacatcaaggagggtgttagagaagtctgggaaagaccataccatattgctagttctgccatcaggggtataccattacaggatcatcgtcgatggggaaccgaaatatgtccctgaactacctcatgtggctgatgagggagggcaggttgccaacctcctcgatgtccatgattatatcccagaaagcctgggcagcgtggcaggattcgactctcctccgtcgcctgaacacagctatgatctccagctcccaggtgatgaggagtttgccaaggagccacctatactgccacctcagcttgtaatgtctgttcttggtgatactgataactctgaagaacaaactctgaagccaaagcatgttgtcctcaaccacctgtatatcgagaaaggatggggatcgcagtcgctgcttgctcttggagtcactcaccggtttcaatccaagtatgtaagcttcgtgctgtacaagccgctgcgaaggtcatccacggcgaagcgaacaaagaatggtggttaaactcatggtaactgacaatgtacataagtgaaatgcaggaggtcttgttgtttgatgctgatcaaagcaatcaactttttttttaatttctctctttgtttctttaataagctgttgttgtagcatgatgttttagaagcctgaactctatgagaaaatgagtcaagagagggatgaaaaaaaaagagaatatccctctatgcttacctaatgtcagtgtgcaaatttgtgtggtctgagagtaatggtgcatggaaatttgaaaaagcctgtgaatttatgcaaatatgtgttctcatttttcctgtgatgcggagaaactggaagaaagaagatgctgagaccagcagctgctgaagaa

SEQ ID NO: 78 - DNA, 1766 bp, Oryza Sativa
ctggaaagagagagagagatgggtgcgtcctctctataaatccacctcgtgttgctgctcccacaccccccctcctcgatcatctcctcctccctaccaacaaccaccaccatcctcttcttggcacttggcatcaagagacacatccagacgcctcgagttgtagctagcaccagtggctcagcttgcccagtgctgctgcatcgatcagtggcagtagctagctcagctctagccttttgccaccgaccgctccgatcgaatccggtgctaggctagccagcctcctcgctctttataaccccagccgccattggagagggagggagggagctagagctttgttcttgttcttgcatgctgttcttgttgatcgagtgagagagggggaaggaagaaaggagggaggcacatgcttataccgttcgtgctggagttcctgatcgatgtcgcctgtgatcagtgagatcctcctctcggggtttatgatcaactccacactccggcgccgcacccatctcgtccagtctttctccgtcgtcttcctctactggttctatgtcttctcataagctactcgccatccatttccctctcctcctctctctctagcttccttctacaataatcgatctcgtgttcgtcgtcgtcgttcttgtcgatctctgtgtgtgttcttcgtcgtcgtcgtgttcgttttggattttggtttcagtttagtatatgcacttcttgttcttcactgctgctgctgctgctaagcttgtagcaatctagtggtgcttgttgttcttcttctcccgaaatctttgcgatcgattgattgatggcatcgtcaagcgggagcggggggagcgcggtgtcggcggcgacggcggcggcgggggggtcgtcgtcggcggcggaggaggagctgagggcgcttatggagcagcggcgggcgaagaggatgctgtcgaacagggagtcggcgcggcggtcgcggatgcggaagcagcgccacctcgacgacctcaccgcgcaggtggcgcacctccgccgcgagaacgcgcacgtcgccaccgcgctcggcctcaccacccagggcctcctcgccgtcgacgccgagaacgccgtcctccgcacccaggccgccgagctcgccgcgcgcctcgcctccctcaacgacatcctctcctgcatcaacaccaacggcgccgccgccgccgccgccgccgccctcaccgtcgccgccgccaccgacccgctcctcgccttcgactccgccgccttcgacgacctcttcagatcctcccccgagctgttccagctttgctagctcaaacactgaagctgaagctgccatggcagagaccaagaagaagatgaagaaaattacagtacttgccactgggggtaagcaactaagcactgcacctaacgaagctaagctagctgctagggctaattaatggcctaattatcttgtgtaattggtaaatcaagtgatggttaagttaagccttctgcatgcatcatcatcatcatgtactccaactatgtaaggattaatgaggcagtaagctttctgtttctctgtcaaaacaaatcaaggaagtgcaatatataattactactactattactctctctctctctctctctgctgtctcatggactcatggtatgtatgtttgcttttgaattaatcagtttagtaattcttatattttttaagaattactaaactgtgttgagatgcaatgttatattggtgctttactact

SEQ ID NO: 79 - DNA, 999 bp, Brassica napus
atgtcaacctccaaaaccctagataataacaaacactttgaaacatcccaaactcaaatgggttttgctctaatcaaccaaaacacaaccaacgcaaccaccgctacaaccggcgagagacgaggccggagatcaaagcaagcagagccagggaggttcctaggagtcaggagacgtccatggggtcgttacgcagctgagattagagatccaacaaccaaagaacgtcactggctcggcactttcgacactgctcatgaggccgctcttgcctacgatagagcagctctttcaatgagaggcactcaagctcgtactaacttcgtctacactccaaatgacgttcacaccatcctcacaaaccctaatctccactctctcatagtctctccttacaataaccaatctttattacaaaactcttctccacagtttgtcattgatcaccatcctcattatcaaaactatcagcaacctaaactttctctcccccaaaccgtcttacccgctgcttcttttaaaactcccgttcgtcatcaaaacgctgatattcaagcgtttggttctagtcctcaaaactcctcttcgaacggctcgttatcttcttcactagatgaagaaaataacttcttctcgttagaaggaagtaactccagtaacaactcgggttacttggactgcattgtcccaaaccattgccttaaaccacctcctgaaaccaccaccatccaaaacgaaagcggagctggtttcacaactccagcaagcaaggcttcagagtcatacgaagggtttagtaatagttacttccaggatgttgacatgatgatggagtttggttcgtgtgatctctctgccatgatcactaactatggtgctggtacttccatgtcaatggaagattacgcaataatggagccacaaaacttttcttcttcttctatcgctgcttttggagatgttgttgcagacactacaggcttctactcactctattag

SEQ ID NO: 80 - DNA, 1047 bp, Brassica napus
atgataagtgggggagatgtttacaaggccatcgaagcaatggttccactctatgttgccctaatctcaggctatggttcggtgaaatggtggaacatcttcactcgtgatcaatgtgatgccataaaccagctcgtttactatttcaccctaccacttttcaccatcgagttcacgactcatgtcgacccattcaacatgaattaccggttcattgcagcagatgttctctctaagatcatcataattgcggtcttagcgttttgggccaagtatagcagcaaaggaagttattgttggtccattacaagtttctctctatgcactcttactaactctcttgtggtgggtgtgccattggcaaaggcgatgtatggacaagaggctgttgatctcgtggttcaatcctcggtgtttcaggcaatcgtgtggctcacactcttactgtttgtcttagagcttagaagagccggctttagtagtaataataaggtagatgacatcaatatcgaaggtggtagaaaggaaaccgtggttgtgagagaggagaagtcgttccttgaggtcatgtccgtcgtgtggttgaagctcgcaacgaatccgaattgctattcttgtatccttggaatcgcatgggcttttatatctaacagatggcattttgagatgccgggcataatagagggatcgattcttataatgtcaaaagcaggaacaggaactgccatgttcaatatggggatattcatggcacttcaagacaagttgatagtatgtggaacaagcttgactgcgatggggatggtcttgaaatttattgccggacccgccgccatggccattggttcaatcgcggttggtctctacggagatgttctccgcgtcgccatcattcaggctgctttgccacaatcaatcacttcgtttatttttgctaaggagtacggattacatgcagatgttctaagcacagcggtgatattcgggatgttggtctctttaccagtcctcgtcgcctactatgcagctttggagtttattcactaa

SEQ ID NO: 81 - DNA, 1920 bp, Brassica napus
atgatcaccggcaaagacatgtatgacgtactagcggcaatggtgccgctatacgtagctatgatgcttgcctacggttcggtacggtggtggggaatattcacaccggaccaatgttccggtataaaccggttcgttgcggtttttgcggttcctcttctgtctttccatttcatttcctccaatgatccttatgccatggattaccaattcctcgccgccgattcacttcagaaagtcgtcatcctctccgcactctttctttggcaggcccgaataattaatctaaccgcatctggttgtcggagaggaagtctagaatggatgataacgctattttccctatcgacactgcccaacacgttggtaatgggaattccattgctccgggcgatgtacggagacttttcaggcaacttaatggtgcaaatcgtggtgcttcaaagtattatatggtatacactaatgctcttcttgttcgagttccgtggtgctaagcttctcatctccgagcagttcccggaaaccgccggttccatcacttctttccgagttgattctgacgttctatctctcaatggccgtgaacccctcgagaccgatgcggagataggtgacgacggaaagctccacgtggtggtccgaagatcaagcgctgcctcatcgatgatctcatcgttcaacaaatcccacggcggaggatttaactcctccatgatcacgccacgtgcctcaaatctcactggcgtcgaaatatactctgtccagtcgtctagagagccaacgccgagagcttcgagctttaaccagacagacttttacgctatgtttaacgcaagcaaagctccgagccctcatgtttactctcttcagtcgtctaaaggagtgacgccgagaacgtcaaattttgacgaggaagctttgaagaacgcgaagaaaggaggtagaggagcgaaaattccgtcgtacccaccaccgaacccgatgttcaaggggtcaacgagcggagcaagcagcggcggaggaggagagcagaacaaggagatgaacatgtttgtgtggagttcgagtgcttctccagtgtcggaagcccacgcgaggaacgctattaccagaggtgcctccaccgattcatccaccgaccctaaagcttatcttccacctcacgaaaacctcgcttccaaagcgatgcacaatctgatagagaacatgacacccggaagaaaagcacatgtggagatggaccaagagggtaataacgaagggaagtcaggggtaaattcgtcaccttacaacggaaagaagggcagtgacgtggaagacggtggtcccggcggtccgaggaaaccacagatgccgccggccagcgtgatgacgagactaatattgataatggtttggagaaaacttattcgaaaccctaacacttactctagtctctttggccttgcctggtcccttatctccttcaagtggaatataaagatgccaacaataatgagtggatcgatttcgatattatctgatgcaggtcttggcatggctatgtttagtcttggtctctttatggcattgcaaccgaagataattgcatgcggaaaatcagtggcagtcttcgcgatggccgtgaggttcttgaccggaccagctgtaatcgcagccacctcgattgcaattggtcttcgaggcagtctcctccatgtcgccatcgttcaggctgctcttcctcaaggaatcgttccttttgttttcgccaaggaatataacgtccatcctgatattctcagcactgcggttatattcggaatgctggttgctttgcctgtaacagtactctactacgttcttttgggcatttaagctataatcaaaacgtagtggcaaatcaaaggcgatcgatacgaccaaaggtgaattttt

SEQ ID NO: 82 - DNA, 2135 bp, Brassica napus
atgatctcgtggcacgacctctacacggtcctcacggccgtgatacctctctacgtcgctatgatcctcgcctacggctctgtaaggtggtggaaaatcttctctcccgatcaatgctctggaatcaaccgcttcgtggccatattcgccgtccctctcctctccttccacttcatctccaccaacaatccatacgccatgaacctcctcgtcgtcctccagtgtatcatctggtacacgcttctcctcttcctcttcgagtttcgcggcgccaagatgctcatcatggagcagttccctgagacggctgcttccatcgtttccttcaaagttgaatccgacgttgtttccctcgacggccatgactttcttgagacggacgcggagatcggtaacgacgggaagcttcacgtcaccgtgaggaaatcaaacgcttcccgtcgttcgttctgcgggccgaacatgactccgcggccgtctaatctcaccggagctgagatttacagcttaagcaccactcctagaggctcaaacttcaaccagtcagacttctattcgatgatgggtttcccgggcggccgaggaggaggcggctccaaggaactacacatgttcgtgtggagctccaacgggtcaccagtttcagaccgagcgggtcttaacgcccctgattcgggatcaaacaatgaacagggtggaagatctgaccaaggtgcgaaagagatccggatgttagtccccgaccaatctcagaacagcgaaaacaaagctctggctcgtccggcgagtggtgacttcggaggtgaaccagttagtatcacccgaagagaagaaggagagagagcaaaagacgctgagaatggactgaacaaacctataactaatgcgctgctacaatcgaagacaggactcggagccgccgctgaaggtgaagcaagtcaaggaaaacatatgccgcctgcgagcgtgatgacgaggctgatactgatcatggtgtggaggaagctaatcagaaacccaaacacttactctagcctcattggcctcatctgggctctggttgctttccggtggcatgtggcaatgcccaaaatcatacagcaatctatctccattctatctgatgctggtcttggaatggcaatgttcagtttggggttgttcatggcgttgcaacccaaattaatcgcttgtgggaactcagtggcaacatttgcgatggcggttaggttcctcacaggtccggccgtgatggcagttgcctctatagctattggattgcgtggtgatttactgcgtgtcgccattgttcaggccgcattgcctcaagggattgtaccgtttgtgtttgcaaaagagtacaatgttcatcctgctattttaagtacaggggtaatattcggaatgcttatagcgcttcctatcacgctggtttactatattctactcgggttataagcttttgattacgtgaacgcttaaaatggatcaattgtagcgagaacgaagtaaataacacaagagagtgtttcaacttgtgggtggaacaaactaaaagcttagagcatataagtaaaactagagagtagcatgatttaaggatgatgatgcgtacatcacaaaccaagaaaccctttcttctccatatttaacatatagaatattggggaatagaataagagtgagacagtgggacgcatataaggaggagcaaaacatggggcaacgagacaacaaagatgaataaaaaatcgagaaagaagacaacttattatttttgtaattttttgtgacgagcaaaatcctgttttgatgtgttctttgattagattttgggcaacttatgaattgattgattactgtgagttttttttaattagcgaagaaaagtgtggttttgaatctttctagttcaagttttcaggtaagcaaattaaataacgcttttaaagcagtatttattcgtcttaaattgctgagattttaataagttttgtaacaaagtaggtggatttactgatccttgtctgctgtgataatgagaatggtagtggaagaaatgaattgtacgctttggcactgaaagcaattcgtgttatcattagtttaagctgatggtgatataattattgtcc

SEQ ID NO: 83 - DNA, 1089 bp, Brassica napus
atggtctcttggcttgatgtctacaatgttttttcagcaactgttcctctctatgtttcaatgatcttaggttacctctctacgaaacatcttaatctcttttcactggaacaatgcgtaggcatcaacaaattcatcgctaaattttcaatccctttgctttctttccaagtaatctcccaaaacaatccttttacaatgagccttagactcattctctcagacattctccagaaaattttagccgccgttgtattggccgtagttataagattctggcatccaaagggaggaacaggaggaaaattgggttggatcataactggattatctgtaaccgtgtttccaaacactctcattattggaatccctatcttaagtgccatcgatggagatgcagcaaaaaacatcttggtgcagattgttgtgttgcagtgcttgatttggtccaacatcttgctcttcttattcgagattaatgccacgtgggacttacaatcttccggagcttccatagaacatagagtcaatgacaatgaagaaactgatatagagcaagagccaatagaagaagaagcaatagtgagaacaagatcttctggaactgggaagataatactgaaggcttggagaaagttcatagttaatcctaatacatacgcagcaatgattggattaatctgggctactttacatttcaggttggggtggaaattgcctgagatgattgacaaatcgatacatttgatatctgatggaggcttaggaatggccatgttcagcttaggtcttttcatggcatcacaaagtagtatcatagcatgtggaacaaaaatgtcgattataacaatgattctcaagtttatattaggacctgctcttatgattgcttctgcattttgtatcagattacgaggtactcttttcagagtcacaatattacaggctacattgccacaagggatcgtgccatttgtttttgcaaaagagtataatgttaatccagagatcgttagtacgggggtgatatttggaatgctagttttcgtaccaataactttggcatattattttgtactggacctatga

SEQ ID NO: 84 - DNA, 1682 bp, Brassica napus
atggagctgatgaatatggcgtcaaaagaaacaagttactggatgatcgcactacctgccgtttttggaacccaaaacatgtacgatgtttccatcttcggctatctaatcctcgccgtcgtttctctctctctactgacgtgggctttcgccggaggcggtggtgttgcatggaagaacggccgtaaccgtattggtcgtgtcgcgattcctggtcctcgaggcataccagtatttggaagtcttttcactctaagccgcggcttagctcatcggtcgttagccgccatggcttggagccgagccaatactcagattatggctttcagcctgggcaccacgcctgttatcgtggcttctgagccgaacacggctcgtgagattctgatgtcgcctcactttgcggaccggccggttaagcagtcggctaagagcctcatgttcagccgagccataggtttcgcgcccaacggggcttattggcgcacgttaagaaggattgcctcgactcatctattcgccccaaagcgtattttagcacatgaagctggacgtcagctagactgcgccgaaatggtgaaagctgtgtcggatgagcaaaacggcgctggatctgtcgttttgaggaaacacttgcagctagcggccttgaacaacatcatggggagcgtgtttgggagaagatacgaccctctggctcaggaagaggctcttgatgagcttacttcaatggttagagaagggttcgaactcttgggtgcttttaattggtccgatcatctttcatggttgagttatttctatgatccggttcgtttaaagcaacgttgctcagaacttgttcctcgaatcaaaaccctcgttaagaaaattattgaggaacatcgagcaagtaactcggaaaataaaggagatgttggagatttcgttgatgtcttgttatctttagacggtgacgagaagcttcaagaagatgacatgatcgccgtcttatgggagatgatttttagagggacagatacaacggcgctattaacggagtggaccatggctgagctagtactgaaccctaacgtgcaagctaagctaagggacgagataaaaacggtcgtgggcgaccgagcagaggtgccagatgctgacctggcaaaactcccctacttgaacgcagtgttgaaggaaactctaaggctgcatcctcctggaccactgctatcgtgggctcgtctttccacgtcagatgtccagctcagcaacggtatggtgattccaaagggtactacagcgatggtcaacatgtgggccatcactcacgacccgacggtatggtccgacccgttacaatttaacccggacaggttcattgggaatgctgacgtggacatacgtggtggggatctaaggcttgctccgtttggagctgggaggagggtgtgtccggggaagaacatgggtttagctactgtgactcgttgggtcgctgagctagtgcgacggttcgagtggagtcaagatcagacagaaccggttaatcttagtgaagtcttgaagctttcttgtgagatggagcatccgttacgtgccgttgtaacggaaatatattaaattagggtttttgactttagtcaagcttaagttattttctacatttgttacgtttttgctttgttttgtcgagagag

SEQ ID NO: 85 - DNA, 1499 bp, Oryza Sativa
acacacaagctaagcttagctcgagctcattcatataccttagcttagctaaagcctagctcactctcactctcactcttgcattgcattgcaatattgcaatattgcattggtcatgaacactcgaggcagcggcagtagcagcagcagcagcagcagccaggccagcctgatggcgttctcggagccgccgaagccggcgagccagccgtcgccgccgtcgtcgccgatgagcgagcggccgccgtcggggcgcagcaggcggcgcgcgcaggagccagggaggttcctcggcgtgcggcggcggccgtgggggaggtacgctgccgagatacgcgacccgaccaccaaggagcggcactggctgggcacgttcgacacggcgcaggaggcggcgctggcgtacgaccgcgccgcgctgtccatgaagggcgcccaggcgcgcaccaacttcgtctacacccacgccgcctacaactacccgccgttcctcgcgccgttccacgcgccgcagtacgccgctgccgccgccgcgccgtcctcggtgcagtacggcggcggcgtgggcgcggcgccgcacattggctcgtacggtcaccaccaccaccaccaccaccaccacggacatggcgcggcgtcgggcgcgtcgtcggtgggcgagtgctcgacgatgccggtgatggtcccggttgatccccaccgctccagcatgtcgtcgtcgctgctggacatggacaggaacggccacgacttcctcttctccggcgccgacgacaactccgggtacctgagcagcgtggtgccggagagctgcctccggccgaggggcggcggcgccgcggccgatcatcaggacatgcggcgctactccgacgccgacgcctacggcatgatggggctccgggaggacgtcgacgacctcgcgcagatggtcgccggcttctggggcggcggcgacgcggcggaccagctcggcgcctgcgggttcccggcgagcggcggcgccgccgacatggtcgcctcgtcgcagggctccgactcctactctccattcagcttcctctcccattgatcgagttgcaccgggcattgcatggctaatcacgcactttgcctctgagcgatcatgcatatatcatttcctgtctaccatgatcagatcgagttgatcttgatcaatctgcgtttgatcgatcgagcaagagatcgagtagtatagcagcagcagcagcagcagctagcagtagatcgaacaagaagagtggcttggcgccatttctagttaattaagtagagcttcttcaaatatgtacttaggcagatgatctctctctctctctctctctctctctctctctctctctctcttctatattagcattagtacctacttagccatcatattcatgcatgcatgcatgatatattgcatggcacagcttgttaatttcttctagcatcttaatcaattaatccatgacctggttcaaaatgtccaa

SEQ ID NO: 86 - DNA, 1074 bp, Oryza Sativa
atggcgccgctgtacttcgcgctggggctagggtacgggtcggtgaggtggtggaggttcttcacggcggagcagtgcgccgccatcaacaccatggtggtctacttctccatgcccttcttcaccttcgacttcgtcgtccgcaccgacccgttcgccatgaactaccgcgtcatcgccgccgacgcggtgtccaaggcgatcgccatcgccgccatggcggcgtgggcgcgcacgcgctgcggctgcgccgccgccaaggccggggcgcagtcgtggtccatcaccgggttctccctcgccgcgctcaacaacacgctcgtcgtcggcgtgccgctgctcgacgccatgtacgggaggtgggcgcaggacctcgtggtgcagatcgccgtcgtgcagtccatggtgtggttcccgctcctgctcatggcgttcgagctccgcaaggcctgggtcgtcggcggcggcggcggcgtcgggccggcggtgatgtcgtcgtcgtcgccgccggagaagcagagcgacgtcgagatgaacggcgccgtcgtcgcggcgccgggcggcggcggcggcgtccggctaccgttctgggcgacggcgaggacggtggggctgaagctggcgaggaacccgaacgtgtacgccagcgttctcggcgtcgtgtgggcgtgcatcgcgtacaggtggcacctgagcttgccggggatcgtgacggggtcgctgcaggtgatgtccaggactggcacggggatgtccatgttcagcatggggttgttcatggggcagcaggagagggtgatagcgtgcggggcggggctgacggcgctggggatggcgctgcggttcgtcgccggtccgctcgccacgctcgtcggcgccgccgccctcggcctccgcggcgacgtcctgcacctcgccatcatacaggccgcactgcctcaatcgattgcttccttcgttttcgcaaaggagtatgggcttcatgccgatgtactcagcacggcggttatattcggaacattgatctctctgccgattctgattgcatattacgcggttctgggctttgtctaa

SEQ ID NO: 87 - DNA, 2586 bp, Oryza Sativa
atctagctatctatcagctgccttccatcgtcagcacacaaactacacaagaatctgcttatttataggccaccttgtcccttctacaatggtgcaagaacacacaaattcacacacacactgacacacacaaaccgatcgattgattgattgataatgaagcaagagcaggtcaggatggcagtgctcctcatgctcaactgcttcgtcaaggccacggcgccgccgccatggccgccgtcggcttcgtccgcctccttcctcgacgacctcggcgacctcggcatcgcgccgctcatccgcgccgacgaggcgggcaccgcgcgcgcctccgccgactttggcaacctctccgtcgccggcgtcggggcgcctcggctcgccgccgccgccgccgtgctctacccgtcgcgccccgccgacatcgccgcgctgctgcgcgcgtcgtgcgcacgcccggcgccgttcgcggtgtccgcgcgggggtgtggccactcggtgcacggccaggcctccgcgcccgacggcgtcgtcgtcgacatggcgtcgctcggccgcctgcagggcggcggcgcgcggcgcctcgccgtgtcagtggaggggcggtacgtcgacgccggcggcgagcagctgtgggtggacgtgctgcgcgcgtccatggcgcacgggctcacgccggtgtcgtggacagactacctccacctcaccgtcggcggcacgctgtccaacgccggcatcagcggccaggccttccgccatggcccccagatttccaacgtgctagagctcgacgtcatcaccggtgtcggggagatggtgacgtgctcgaaggagaaggcgccggacctgttcgacgcggtgctgggcgggctggggcagttcggcgtcatcacgcgggcgcgcatcccgctcgcgccggcgccggcgagggcgcggtgggtgcggttcgtgtacacgacggcggcggcgatgacggccgaccaggagcgcctcatcgccgtcgatcgcgccggcggcgccggcgcggtgggcgggctgatggactacgtcgagggctcggtccacctgaaccagggcctggtcgagacctggcgcacgcagccgcagccgccttcgccgtcctcctcctcctcctcatccttcttctccgacgccgacgaggcccgcgtcgccgcgctcgccaaggaggccggcggcgtgctgtatttcctcgagggcgccatctacttcggcggcgccgccgggccgtccgccgccgacgttgacaagaggatggatgtgctgcgtcgcgagctgcggcacgagcgcgggttcgtgttcgcgcaggacgtggcgtacgccgggttcctggaccgcgtccacgacggcgagctcaagctccgcgccgcggggctctgggacgtgccgcacccatggctgaacctgttcctcccccgctccggcgtcctcgccttcgccgacggcgtcttccacggcatcctcagccgcacccccgccatgggccccgtcctcatctaccccatgaaccgcaacaagtgggacagtaacatgtcggcagtgatcaccgacgacgacggtgacgaggtgttctacacggtggggatcctgcggtcggcggcggcggccggcgacgtggggaggctggaggagcagaacgacgagatcttgggtttctgcgaggtggccgggatagcctacaagcagtacctgccttactacggcagccaggcagagtggcagaagcggcacttcggtgccaatctctggccaagattcgtgcagcggaagagcaagtatgatccaaaggccatcctgtcccgtggccaggggattttcacgtcaccactcgcatgaaatgacacatgtatgcaaatgcatatctacatgcgtatatatacacgtatatatacgtatgtatgcatacacatatgggtgtactgtgcatacgttatagcacactgcagctaattaagcttgacagggagatcgatcaatggacaatgctctagtcaagctaatataaataatggagtagtagtatatatgtagtgcgagataattaagtagtgtgtttgcctactaaaaggagaggcaaagtagtactgtgatgcatgcatgccaactaataggtgataagtacgtgtgtgtggccgcatgtatgattagaagaagttggtttttaattaattaattaggtcatgtatgtaaatatatagtacagtactacgtactactagtgtactaccagccaatttgcatgcatgcatggatgccttcatatgcatgtcgatctcaaacgtacggcatgcttgaatgcatcatgatgcatatctatcgtcgtcttgtgggtgtaaactaaattaatcttagttatatgtattataagtttgcaatatttttccatgcatatgaatgctagtaagatatccctccttacgtccaagaaaaaaaaatttacttctagaatacttgtatatctaaattcattcatatatatatatatatgtatatatgtgtgtgtgtatatgtatatgtatatgtatatgtatatgtatatgtatatgtgtgtgtgagagagttttgttt

SEQ ID NO: 88 - DNA, 1844 bp, Oryza Sativa
tctcttccctctctctctttctctctccaaaccccacgcacgccgcgtcgccgcctcctcctctccatctccgctgctattattgcccgcgcagacgcaggccaccatccttcctctcgctcacgctcgctgctatatgggggtcctcctcatcgcatcgcatcgcatcacctcgcacgggcgcgcgcgccgtgccgtgccgctagctcgatccgcctcgtacgccagctcgctcgctcgctcccccaccccgctgctgcacggctgcgcccgcgctgtcccctgtccccccgctcgccgcggcgatttatacccaccacgccccctgctgctgctataatgcccatgagtgaaggcggcgaggggtggttctgagttggccgttggcgtgctgcgtgtggagatgggggaggaggcggtggtgatggaggcgccgaggcccaagtcgccgccgaggtacccggacctgtgcggccggcggcggatgcagctggaggtgcagatcctgagccgcgagatcacgttcctcaaggatgagcttcacttccttgaaggagctcagcccgtttctcgttctggatgcattaaagagataaatgagtttgttggtacaaaacatgacccactaataccaacaaagagaaggaggcacagatcttgccgtctttttcggtggatcggatcaaaattgtgtatctgcatttcatgtctttgctactgttgcaagtgctcacccaagtgcaaaagaccaaggtgcctcaattgttcttgcagctcatgctgcgacgagccatgctgtaagccaaactgcagtgcgtgctgcgctgggtcatgctgtagtccagactgctgctcatgctgtaaacctaactgcagttgctgcaagaccccttcttgctgcaaaccgaactgctcgtgctcctgtccaagctgcagctcatgctgcgatacatcgtgctgcaaaccgagctgcacctgcttcaacatcttttcatgcttcaaatccctgtacagctgcttcaagatcccttcatgcttcaagtcccagtgcaactgctctagccccaattgctgcacttgcacccttccaagctgtagctgcaagggctgtgcctgtccaagctgtggatgcaacggctgtggctgtccaagctgcggatgcaacggttgtggctgtccaagctgcggttgcaacggctgtggccttccaagctgcggttgcaacggctgcggctcgtgctcttgcgcccaatgcaaacccgattgtggctcgtgctctaccaattgctgtagctgcaagccaagctgcaacggctgctgcggcgagcagtgctgccgctgcgcggactgcttctcctgctcgtgccctcgttgctccagctgcttcaacatcttcaaatgctcctgcgctggctgctgctcgagcctgtgcaagtgcccctgcacgacgcagtgcttcagctgccagtcgtcatgctgcaagcggcagccttcgtgctgcaagtgccagtcgtcttgctgcgaggggcagccttcctgctgcgagggacactgctgcagcctcccgaaaccgtcgtgccctgaatgttcctgtgggtgtgtctggtcttgcaagaattgtacagagggttgtcgatgcccacggtgtcgtaacccatgctgtctcagtggttgcttatgttgatctagatccttttttggttgttgtttttcttgtattttttagttgttaggcctttgattaagttcgaactttcataaatatatggtgtttatcctgtaaagaaatgatgatttcaaggatttttcatagctatgagacgaggttgaaccattgaagcgcc

SEQ ID NO: 89 - DNA, 2800 bp, Oryza Sativa
ttcagagagagagagagagagagagagctagtgctcctaggaggggggggggggaggggttgaagatcacatggtgacctttttttgggtatgtgacagcttcttcctttagtcttttagtgcttccttttatctcctcttcctcatgaaacccctttcaaaacctcatagcctcatcagctgatcactgagtgccttctccttctcctcctcctttaagaaccctcttccctgcccatccttttcttcatcccctcaactttgcctaaaaggcaagaacaaagccatatgattctctgatcccttcttccaagctgcatcccaacacaacacattgtggtgacacagcaaacataatatacacacatcctcttcttcttctaccaccctccatattcctgcaagaaacaactggaggaagaatcactactccaacaccatggaggttgccatggtctgcacaagagttaacctgctcatcctcatcctttctctctgctccccatacaagtttatacagagccccatggactttggccctttgaacctccttcccaccaccaccactgcatccagtgactttggtagaatcctcttccactccccatctgcagttctaaagccccaagctccaagggatatatccctgcttctcagcttcctctctgcctcacctcttggcaaggtgacggtggcagccaggggagcaggtcactccatccatggacaggcacaggcccttgatggcattgtagtggagatgagctccttgccttctgagattgaattctacagaagaggagaaggagatgtttcttatgctgatgtgggtggtggaatcatgtggattgagcttctggagcagagcttgaagcttgggctggctccaaggtcttggactgattacctctatctcaccattggtggaaccttgtccaatgctggcatcagtgggcagacattcaagcatggacctcagattagcaatgttctacagctggaagtagtcacaggcaggggtgagattgtgacctgttcacccaccaaggatgcagagctattcaatgctgttcttggaggccttgggcagttcggcatcattactagggcaaggatcctgctgcaggaagctccacagaaagtgaagtgggttagagccttctatgatgatttcgccaccttcaccaaagaccaggagttgctggtgtcaatgccggttttggtggactatgtggaaggtttcatcgtgttgaatgagcaatcccttcacagctcctccattgccttccctacaaatgttgacttcaacccagattttggcaccaagaacaaccctaagatctactactgcatagagtttgctgtccacgattaccagaacaagaacatcaatgtggaacaggtcgtggaagtcatctcaaggcagatgagccacatagcatcccacttgtatagcgtggaggtgtcctactttgattttctcaacagggttaggatggaggagatgagccttaggaacagtgggctctgggaggtgcaccatccatggttgaacatgttcgtgccaagcgctgggattagtgacttcagggacctgctcatggacagcatctcaccggataacttcgagggcctcatcctcatctacccactcctcagacacaagtgggacaccaacacgtcggtcgtgttaccggactccgggtcgacggaccaggtgatgtacgcggtgggcatcctccggtcggcgaaccccgacgacgggtgctcccaccactgcctccaggagctcctcctccgccaccgccgcctcgccggcgccgccgcgtcgggcctcggcgcgaagcagtacctcgcccaccacccgaccccggccggctggcgccgccacttcggccggcggtgggagcggttcgccgatcgcaaggcccggttcgacccgaggtgcatcctcgggccaggccagggtatattccccagggacagcagcagcagcaatggcgcatttgcaagctatagctgacacgagaaagtgcagtgtagtgctgtgctgtgccgtgccgtgccgtgccgtgacagctggtggtacaataagagggggacataggataggcaggcgaggctaggagggagatcttgttctttcttttcgatagctttcttttctgcttcgatttgaggccggcatcgttttggttggttgatgtggttgggcgggggttgattttgaacggatcctcggtggtggtgatcaccatcatcactgggaattttggaactttgtacaggctgaggaagcaagaacagctctagggcgaaaggatagtgatagcgattctatttcgatctggattccatgctcgatctttggcgccattagtattaattgttgttgccattgttctcactccacgccattagtatcagtgacgccattagtattgctttgcacttagctcgtttgatttgttcgcacaaaccgacgccactttagttaaccaacttttacttttgttgggctagtgcagattgtagtgttgcgacccctttcgtaagtactctgttttttctctaatgccgccgcacttatgtgtcaagcagtttgtttgccaaaaaaagatgtggtcatgtggaagtgtaaagacagtggagtgccacacttctgaatcgtgtacggacttttttcgcagtggaaccgttttctgttttccctttttttttccccttttctaccaccaaacagcgttaagatgcgagctgttgtggttttgtgcatgatacgtcgattgattttgatgtt

SEQ ID NO: 90 - DNA, 1932 bp, Oryza Sativa
acactcacctcaccatcatctcttctcctcgtgctcgtcactcgcgagcaaatacatcgccatctctcctcctcctccttgtcgtcatagtgcacgcaaagaaacacggtttgcaatggcgtggtgcttggtgttcatggtgttcttgatctactgcctcatctcgactgtcgggctgccggtggcgccggccgacgaggcggcgatgcagctgggcggcgtcggcggtgggcggctcagcgtggagccgtctgatgtgatggaggcgtcccttgactttgggcggctcaccagcgccgagccgctggccgtgttccacccgcgcggggccggcgacgtcgccgcgctggtgaaggcggcgtacgggtcggccagcggcatccgcgtctcggcgcgggggcacggccattccatcagcgggcaggcccaggcggccggcggggtggtcgtggacatgagtcacgggtggcgcgcggaggcggcggagaggacgttgccggtgtactcgccggcgctcggcgggcactacatcgacgtgtggggcggcgagctgtggatcgacgtgctcaactggacgctggcgcacggcgggctcgcgccgcgctcgtggacggactacctctacctttccgtgggcggcaccctctccaacgccggtataagtgggcaagctttccaccacgggccccagatcagcaacgtctacgagctcgacgtcgttaccgggaaaggagaggtggtgacctgctcggagtccaacaacccggacctcttcttcggcgcgctcggcgggctcggccagctcgggatcatcacgcgcgcgcgcatcgccctcgagcctgctcctcacagggttcgctggatccgggcgctctactccaacttcaccgagttcaccgcggaccaggagcggctcatctccctgcagcacggcggccggcggttcgactacgtggagggcttcgtcgtcgccgccgagggcctaatcaacaactggaggtcgtccttcttctcgccgcagaacccggtcaagctcagctcgctcaagcaccactccggggttctctactgcctggaggtcaccaagaattacgacgactccaccgccgtaaccgtcgaccaggacgtggaggcgctgctgggcgagctgaatttcatcccgggcacggtgttcacgacggacctgccgtacgtggacttcctagaccgcgtgcacaaggcggagctgaagctccgcggcaagggcatgtgggaggtcccgcacccgtggctcaacctcttcgtgccggcgtcccgcatcgccgacttcgaccgcggcgtcttccgcggcgtcctcggcagccgcaccgccggtggccccatcctcatctaccccatgaacaggcacaagtgggacccgaggagctcggtggtgacgccggaggaggacgtgttctacctggtggcgttcctgcggtcggcggtgccgggctcgaccgacccggcgcagagcctggaggcgctggagcggcagaaccgggagatcctcgagttctgcgacgaggccggcatcggggccaagcagtacctgcccaaccacaaggcgcagcgcgagtgggaggcccatttcggagcgaggtgggctcggttcgcgcggctcaaggccgagttcgacccgcgggccatgctcgccaccggccagggaatcttcgactcgccgccgctcttggcggagtcctgaaacgaagacgatcgacgaacaagatgatggctagctaggcgcatgtaattagtaagaatcataacaggtgattagttagtcttaatctgatgtgtagattcctcgccccataaaaaaaaatctgatgtgtagacaattctgtacagagggatgtatcagtttcatgcaaaatgtgtgcaatgtttttttgccggtaaaagtcggcgtctgcc

SEQ ID NO: 91 - DNA, 2483 bp, Oryza Sativa
acaacgctagcttgtacatgtgcgcgcatgaactacgggcttaatttgcacctccgagcgaaacattgatcgtttcttatgaagcacacgcccactggtgggtcagtcacgatcgcgcattcaaaatctctcatgtttttacagtaaaatccaccctggagcctggatgacgggagaatgtagaccgctcctcaactctgtgctcgttggacttggacgcagcctataagtggctgaccccgagttctccgagttagcaagaagccactccactcggccgctcctgcatgtataactagctagttctagctcgctcaggcactcgatccaccgccgggcgcgttggattgagataggctgaggagatgatatccgggcacgacttctacacggtgatggcggcggtggtgccgctgtacgtggcgatgttcctggcgtacgggtcggtgcggtggtggggcatcttcacgccggaccagtgctccggcatcaaccgcttcgtcgccatcttcgccgtgccgctcctgtccttccacttcatctccaccaacgacccgtacgccatgaacctccgcttcctggcggcggacacgctgcagaagctgctcgtcctggcggggctcgccgcgtggtcgcgcctcccctcgcggaccggcgcgccgcggctggactggtccatcacgctcttctccctctccacgctgcccaacacgctcgtcatggggatcccgctgctgatcgccatgtacgggccatactccggctcgctcatggtccagatcgtcgtgctccagtgcatcatctggtacacgctgatgctcttcctcttcgagttccgcgccgcgcggatgctgatcgccgaccagttcccggacacggcggcgtccatcgtgtccctgcacgtcgacccggacgtggtgtcgctggagggcggccacgcggagacggaggccgaggtggcggcggacgggcggctgcacgtcaccgtgcgccggtcctcggtgtcgcggcggtcgctgctggtcacgccgcggccgtcgaacctgacgggagcggagatctactcgcttagctcgtcgcggaacccaaccccgcggggctccaacttcaaccacgccgacttcttcgccatggtcggcggcgggccaccgcccccgacgcccgctgcggtgcgcggctcgagcttcggcgcctccgagctctactcgctgcaatcgtcgcggggcccaaccccgaggcagtccaacttcgacgagcactcggcacggccgccgaaaccaccggcaacgaccacgggggcactcaaccacgatgccaaggagctccacatgttcgtgtggagctcgagcgcgtctcccgtctcagaagtcagcggcctgcctgtgttcagtggcggcggcggcggcggcgctctcgacgtcggcgccaaggaaatccacatggtcatccccgccgacctgccgcagaacaacggctcaggcaaagagcacgaggagtacggcgcagtggcattgggtggcggcggcggcggagagaacttcagcttcggaggcggcaagacggtggacggcgccgaggcagtagacgaggaggcggccttgcctgacgggctgacgaagatggggtcgagctcgacggcggagctgcacccgaaggtcgtcgacgtcgacggaccgaacgccggcggcggcgccgcgggcgcggggcagtaccaaatgccgccggcgagcgtgatgacacgcctcatcctcataatggtgtggcgcaagctcatccgcaaccccaacacttactccagcctcctcggcctcgcctggtccctcgtcgccttccggattgttcatggcgctgcagcccagcatcatcgcgtgtggcaaatcagccgccgtcgtctccatggccgtccgcttcctcgcgggccctgccgtcatggccgccgcgtcaatcgccatcggactccgcgggacgctcctgcacgtcgccattgttcaggcggctctaccacaagggattgtgccttttgtttttgcaaaagaatacaatgtccacccggccatcctgagcacagcggtaatttttggcatgctaatagctcttccaatcacattgctgtactacatccttcttggactatgatcaagaaagcttatggacgctctcacataaaacggaagaaatgggggcaaagagagagaaaaaaaagcgatcctgtccatctcaaacagcgtatgcttatatgtatagcctgttgtcggacattgcccatgatgacaagacaacgaagttgttacagagctatatatctctgcgacatttgtacaagagataacgacagaatgtactcaaatataaccgatattagatatgtgttctgttaaagatctcaacactccctatactctcaaaccctttgatgagattgtgacaatgttcagaacagcaatagtgatggcacgttggtaaatgaagaaaaaaaacaaaag

SEQ ID NO: 92 - DNA, 2322 bp, Oryza Sativa
actcactctctgcatgtaacagcaacacactaatcgcacgctgctcctctcgatcgcatcgcaggaaacagatcgatcagctgctcccagaccggcgatcggccgccgccgccatgatatcgtggcacgagctgtacatggtgctgtcggcggtggtgccgctgtacgtggcgatgatggtggcgtacggctccgtgcggtggtggggcgtcctcacgccggagcagtgctccggcatcaaccgcttcgtcgccgtcatcgccgtcccgctcctctccttccacttcatctcctccagcgacccctacgccatgaacctccgcttcgtcgccgccgacaccctgcagaaggtgctcgtcctcgccgcgctcgccgcgtggtcgcgcttccccgcgcgcttcgtccccccggcgtggccgccgctcgactgctccatcacgctcttctccgtctccaccctccccaacacgctcgtcatggggatcccgctcctcgtctccatgtacggcccttactccggcgacctcatggtccagatcgtcgtgctccagtccatcgtctggtacacgctcctgctcttcctcttcgagttccgcgccgcgcgggtgctcatcgcggcgcagttcccggacaccgcggcgtccatcgccgccgtgcacgtcgacccggacgtggtgtcgctcgagggcagccaggcggaggcgcacgccgaggtggcgcccgacgggaggctgcgcatggtcgtgtgccgctcgtcggtgtcgaggcggtccgccgccgccgccgccacgccgcgcgcgtcgaacctgaccggcgtggagatctactcgatcagctcgtcgcggaacgccaccccgaggggctccaccttcaccctcgccgacatccctggtcaccagccgcccaacagcgcgctgcgcgcgtccagcttcggcgccgcggacctcttctcgctgcactcttcgtcgaggcagcacaccccgaggccgtccagcttcgacgagcacgcggcggcgcgggccagagcatccgcgaccgtggctcccaccaatgacctcaaggacacgcacatgatcgagtggagctccggcgcttccgccgcgtcggaggtcaccggcctgccggtgttccgcagcggccgggagacgcgccggcttgtcccctccgacgcgccatccattgcctcgtcgagagttatccgaccgccgccgggagcgacgggcggggagcgcgcggcgagcttcaacaaggccgtgggcgggcaggacgagctagcgaagctggaggccggcgccaagacggagcagcagacgacggcggtgactacgacgacgaagggcggcggcgcagcgggcgcggagcgggcgagagggcagcagaacgcgccggccggcgtgatgctgcggctcatcctcactacggtttggcgccggctgatccggaaccccaacacgtacgccagcctcatcggcctcacctggtcgctcatcgcgttccggttccacatcacgatgccaatcatagtagccaaatcaatctccattctctccgatgcagggttaggcatggccatgtttagcttaggattgttcatggccacgcagccgaagatcatcgcctgcggctactccgtcgcggcggccagcatgggcgtccgcttcttcttcggccccgccatcatggccgccgcgtccgccgccgtcggcatccgaggcacgctcttgcgtatcgccattgttcaggccgccctgccacaaggaattgtgccatttgtgttcgctaaggaatacaacctccacgctaccatcctttgcactttggtcatatttggcatgctaatagctctccccatcaccttggtctactatattattcttgggctactatgaactgatcaggaacggtagtacaaaatcttacacatggcaaagatccggatggtgcagaaccgtggatggacgacacatgttctaacttgcagctgctaacttagcattgctcaatggaactccttggctgagagcggtagatttgaagagcttaccatctgattgttgccgactgctggaccaatggaataacttaagcgaaaacaacagctgaatcaatgttttttttttgactgagctgaatcaatgttttagttgttcactgcacatatctctttccgtgttcttctgattcgatccttgcagacctttttttttttttggccatttgtagtctcgactctcaacagaggatttttgtaactagggattccccgcgctttgcttcgggaattactaagtaattttcaatattattttttcgttacaattc

SEQ ID NO: 93 - DNA, 2469 bp, Oryza Sativa
accttccccaccctcattggctcccccgcctgcctccccttctccatccaccaactcgccgcacactcaaccccgcctcgccgccgcacaccacccaccggcgaagagaagaagtcgtggtttttcttggctgcaagatgataacgggggcggacttctaccacgtgatgacggcgatggtgccgctgtacgtggcgatgatcctggcgtacgggtcggtgaagtggtggcgcatcttcacgcccgaccagtgctccgggatcaaccgcttcgtggcgctcttcgccgtcccgctcctctccttccacttcatctccaccaacaacccctacaccatgaacctccgcttcatcgccgccgacaccctgcagaagctcatcgtcctcgcgctcctcaccctgtggagccacctctcccgccgcggctccctcgagtggaccatcaccctcttctccctctccacgctgcccaacacgctcgtcatggggatcccgctgctgaaggggatgtacggggagttctccggtagcctcatggtgcagatcgtggtgctccagtgcatcatctggtacacgctgatgctcttcatgttcgagtaccgcggcgccaggatcctcatcaccgagcagttcccggacaccgcgggcgccatcgcgtccatcgtcgtggacgccgacgtcgtgtcgctcgacgggcggagggacatgatcgagacggaggccgaggtgaaggaggacggcaagatacacgtcaccgtgcgccgctccaacgcgtcgcgctccgacgtctactcgcggcgctccatggggttctccagcaccacgccgcggccgagcaacctcaccaacgccgagatctactcgctgcagtcgtcgcgcaacccgacgccgcggggctccagcttcaaccacactgacttctactccatggtcgggcgcagctccaacttcgccgccggggacgcgttcggggtgcgcaccggcgccacgccgcggccgtccaactacgaggaggacgcggcggcgcccaacaaggccggcagcaagtacgggcagtacccggcgcccaacccggccatggcggcgccgcccaagcccaagaaggcggccaacggccaggccaagggcgaggacggcaaagacctccacatgttcgtctggagctccagcgcgtcgcccgtgtccgacgtcttcggcaacggcgccgagtacaacgacgccgccgccgtcaaggaggtccgcatggccgtcgcctcgccgcgcaaagcggacggcgtggagagggacgacttcagcttcgggaacagaggcgtcgccgagagggacgcggaggccggcgacgagaagagcgtggcggcggcggtgtcgggtgagcatggcaagcctggcttgacgccggcgccgacggcgatgccgccgacgagcgtgatgacgcggctcatcctgatcatggtgtggcgcaagctcatccgcaaccccaacacctactccagcctcatcggcctcatctggtcgctcgtctgcttccggtggaacttcgagatgccggcgatcatcctgaaatccatctccatcctctccgacgccggcctcggcatggccatgttcagcctcgggctgttcatggcgctgcagccgcggatcatcgcgtgcgggaacaaggtggcgacgttcgccatggcggtgcggttcctgaccggcccggccgtcatggccgccgcctccatcgccgtcggcctccgcggcacgctcctccacgtcgccatcgtgcaggcagcgttgccacagggcattgtccccttcgtcttcgccaaggagtacagcgtgcaccccgacattctcagcacggcggtcatctttggcatgctcatcgcgctgcccatcacgctggtgtactacatcctgctggggctgtgactgtgaacaaccaccaccaagaacagcatgtttttgcaggtgagggtcgtcatgtttgcagcgagtgccgggacagaggagaagacaaagggctgcatgcatgcatcacgctgcagtcacccaccagttcaccatggaggaggaggagcaagaagccaagcaaccaagcagcaatgcagtgcagcagctgggttttcattagagtttttttaggtgtagagatcgatggatgggagtatggataattgttttagggcagagagttccaaaaattgcaggcatgtgcaaaggctttggagggaggggagggggaggggacagggttcaggtttttagtacagggcctgggggtttataggggagtgagaatgtgagatgcatcgcttggctgggttggctggccttgtggtgaaatgggtgtgtgtcactttggtggaaaaaaaacaaatggtttagtagagctcttgttcatcctacggtatagtagtactttggcatggcacaatgcttcggctttgattagcaagattaatcaataatactagtaatagct

SEQ ID NO: 94 - DNA, 2482 bp, Oryza Sativa
gagctcgggccgcgctgccatctcgcctaaataaaaccgcgctacccatcgaccgatcctactcgcacgcgcacacacccaatcaaatgctcctcctccgccgcctcctctcgctgagctgagctgagctgtgaaatagtgccaccgagtgagcgctgagctgagctcgaagcaagagaggaagaggaggaggagggaagagggggggcgaagatgattacggcggcggacttctaccacgtgatgacggcgatggtgccgttgtacgtggcgatgatactggcgtacgggtcggtgaagtggtggcgcatcttcacgccggaccagtgctccgggatcaaccgcttcgtggcgctcttcgccgtgccgctgctgtcgttccacttcatctccaccaacaacccgtacacgatgaacctccggttcatcgccgccgacacgctgcagaagctgatggtgctggccatgctcacggcgtggagccacctcagccgccgggggagcctcgagtggaccatcacgctcttctccctctccacgctgcccaacacgctcgtcatggggatccctttgctcaagggcatgtacggggagttctccggcagcctcatggtgcagatcgtcgtgctgcagtgcatcatctggtacacgctcatgctcttcatgttcgagtaccgcggcgcccggatgctcatcaccgagcagttcccggacaccgccgccaacatcgcctccatcgtcgtcgacccggacgtcgtgtcgctggacggcaggagggacgccatcgagacggagacggaggtgaaggaggacggcaggatacacgtcaccgtgcgccgctccaacgcgtctcgctcggacatctactcccgccgctccatgggcttctccagcaccacgccgcggccgagcaacctcaccaacgccgagatctactcgctgcagtcgtcgcggaacccgacgccgaggggttcaagcttcaaccacaccgacttctactccatggtgggccgcagctccaacttcggcgcggccgacgcgttcggcgtccgcaccggcgccacgccgcgcccgtccaactacgaggacgacgcgtccaagcccaagtacccgctcccggcgtcgaatgcggcgcccatggcgggccactacccggcgccgaacccggccgtgtcgtcggcgcccaagggcgccaagaaggcggccacgaacgggcaggccaagggcgaggacctccacatgttcgtctggagctccagcgcgtcgcccgtgtccgacgtcttcggcggcggcgcgccagactacaacgacgccgcggcagtcaagtccccccgcaaaatggatggagcgaaggacagggaggactacgtggagcgggacgatttcagcttcgggaacaggggcgtcatggacagggacgcggaggcaggggacgagaaggcggcggcggcggcgggcgccgaccccagcaaggccatggcggcgccgacggcgatgccgccgacgagcgtgatgacccgcctcatcctgatcatggtgtggcgcaagctcatccgcaacccgaacacctactccagcctcatcggcctcatctggtccctcgtctgcttcaggtggaacttcgagatgccggccatcgtcctgaaatccatctcgatcctgtcggacgcggggctcggcatggccatgttcagtctcggtctgttcatggcgctgcagccgcacatcatcgcgtgcgggaacaaggtggcgacgtacgccatggcggtgcggttcctggccgggccggccgtgatggcggcggcgtccttcgccgtcggactccgtggcacgctcctgcacgtcgccattgtccaggcagctctgccccagggcattgtccccttcgtcttcgccaaggagtacagcgtgcaccctagcattctcagcacagctgtcatctttggcatgctcatcgccttgcctatcaccctcgtctactacatcttgcttgggctgtaatcgagttgcatgcatgtaaattcctgctcctgacaaccagccatgttaagaagaggggagaagaagacagagctggtacactgtttgcaaagtcaggactctttgatttttcttttcttttctgtatttcttgaagtagaatttgggaggagggggattggaagggagtcaaacgagtcaaggggaggacaggatggtagctagcttagctaggacaatggtgagtcacaaaagagcaccaaaagcaagtacaagtacaaagcttggggggacacaggatccagttcaggtcacagaaacggttcggttttgggaggggattgtgggagttttggttggctgcgctgcgctgacccttgtaaaacggacgccgattctgacaagagatcgaccttgttttgttcgtgtcgtggtattgctgactactactttggaatgattaatctcctactactaattactccagtctttttgctgtaaa

SEQ ID NO: 95 - DNA, 2281 bp, Oryza Sativa
ctcgctgctgctgcttttgcccaaagctgcacaacctgcattgcctctcgcctgaccctcttgcctcatctgtgtctccccccttctctttttcttcaacccctctttatgctcgtttctccattgcagctcacctccatctcctattctcctcctccttgttgaaggagttcgtgtgcctctaccaagaacaagaagaagcctcttgcatcggcagccatgatcacggtggtggacctgtaccacgtcctgacggcggtggtgccgctgtacgtggcgatgacgctggcgtacgcctccgtccggtggtggcgcatcttctccccggaccagtgctccggcatcaaccgcttcgtcgcgctcttcgccgtcccgctcctctccttccacttcatctccaccaacaaccccttcgccatgaacctccgcttcctcgccgccgacacgctccagaagctcatcgtcctcgccctcctcgccctctggtgccgcctctccgcgcgcgggtcactcgactggctcatcaccctcttctccctctccaccctccccaacaccctcgtcatgggcatcccgctgctcaaggggatgtacgccgccgccgccgacgtcgactccggcagcctcatggtgcagatcgtcgtgctccagtgcatcatctggtacacgctcatgctgttcctcttcgagtaccgcggcgcgcggcttcttgtcatggagcagttcccggacaccgccgcctccatcgtctccttccgggtggattccgacgtcgtctcgctcgccggcggcggtggtggagccgcggagctgcaggcggaggcggaggtcggggacgatggcaggatgcgggtcaccgtgcgcaagtcgacgagctcgcgctccgaggcggcgtgctcgcacgggacgcagtcacactcgcagtccatgcagccgcgcgtctccaacctctccggcgtcgagatttactcgctgcagtcgtcgcggaacccgacgccgcgtggctccagcttcaaccacgccgagttcttcaacatcgtcggcaacggcaagcagggcgacgaggagaagggcgccgccggtggcgggggccactcgccgcagccggtggtggggaagaggaaggacctgcacatgttcgtgtggagctcaagcgcctcgccggtgtcggagcgcgccgccgcagcagcagctggcgcggtgcacgtcttcggcggtggtggcgccgaccacggcgacgccaaaggagctcaggcctatgatgagtacagtttcgggaacaagaacgagaaggacgggccgacgctgtccaagctggggtccaactcgacggcgcagctccggccaaaggacgacggcgaggggatggcggcggcgatgccgccggcgagcgtgatgacgaggctcatcctgatcatggtttggaggaagctgatcaggaaccccaacacttactccagcctccttggtgtcatctggtccctcgtctcctacaggtgggggattgagatgccagccatcatcgcccggtcgatttcgatcctgtcagatgcagggcttggaatggccatgttcagcctaggattgttcatggcattgcagccacggatcattgcctgtgggaactcccttgcttcgtatgccatggccgtcaggttcctcgtgggtccggccgtcatggctgccgcctccatcgccgtcggacttcgcggggtgcttctgcacattgccattgttcaggccgctcttcctcaaggaatcgtgccctttgtgtttgccaaggagtacaatgttcatcctaacattctgagcacagccgtgatattcgggatgctgattgctctccccatcacattggtctactacatactgctggggctctgaagagctctccaagtctcaactcaactgtgcaagaacttgatgttactgacagtttgattaggatttatggttctgttttagttgctcagattttgtttggatgataggtcagcttagtgatgctagttagacaattatccgaggacttttgggttcaagtgacggccagccacggtttctgattgaagattaggaacatagacatcacattagtgacaacaggcatctaatttgtaagacattgagaaggtctgtttcaaattactgacaatgtagtaagacattgaacagtgcttataagcttatttagcattccaataactgatggtaatgcacttaaaggagctactctgaaggacttttttaatctcttgagagattagctccggattttttc

SEQ ID NO: 96 - DNA, 1530 bp, Oryza Sativa
cgagtaccgtggcgcgcggcttcttgtcatggagcagttcccggacaccgccgcctccatcgtctccttccgggtggattccgacgtcgtctcgctcgccggcggcggtggtggagccgcggagctgcaggcggaggcggaggtcggggacgatggcaagatgcgagtcaccgtgcgcaagtcgacgagctcgcgctccgaggcggcgtgctcgcacgggacgcagtcacactcgcagtccatgcagccgcgcgtctccaacctctccggcgtcgagatttactcgctgcagtcgtcgcggaacccgacgccgcggggctccagcttcaaccacgccgagttcttcaacatcgtcggcaacggcaagcacggcgacgaggagaagggcgccgccggtggcgggggccactcgccgcagccggtggtggggaagaggaaggacctgcacatgttcgtgtggagctcaagcgcctcgccggtgtcggagcgcgccgccgccgccgccgctgccggcgcggtgcacgtcttcggcggtggtggcgccgaccacggcgacgccaaaggtgctcaggcctatgatgagtacagcttcgggaacaagaatgagaaggacgggccgacactgtcgaagctggggtccaactcgacggcgcagctccggccaaaggacgacggcgaggggagggcggcagcgatgccgccggcgagcgtgatgacgaggctcatactgatcatggtctggaggaagctgatcaggaacccaaacacttactccagcctcctcggtgtcatctggtccctcgtctcctacaggtggggaattgagatgccggctatcatcgcccggtcgatttcgatcctttcagatgcagggctcggaatggccatgttcagcctaggattgttcatggcattgcagccacggatcattgcctgtgggaactcccttgcttcgtatgccatggccgtcaggttcctcgttggtcctgccgtcatggctgcggcctccatcgccgtcggacttcgcggggtgcttctgcacattgccattgttcaggccgctcttcctcaaggaatcgtgcccttcgtgtttgccaaggagtacaatgttcatcctaacattctgagcacagccgtgatattcgggatgctgatagctctccccatcacattggtctactacatactgctggggctctgaagagctctccaagtctcaactcaactgtgcaagaacttgatgttactgacagtttgattaggatttatggtctgttttagttgctcagattttgtttggatgataggtcagcttagtgatgctaggtggacaattatccgagaacttttgggttcaagtgacggccagccacggtttctgattgaagattaggaacatagacatcacattagtgataacaggcatccaatttgtaagacattgagaaggtctgtttcaaattactgacaatgtagtaagacattgaacagtgcttatttagcattccaataactgatggtaatgcgctt

SEQ ID NO: 97 - DNA, 2428 bp, Oryza Sativa
ttaattagctcgttctcttgtgtcaagaaaaaaaaagaaagaaaaagctcgccgccgccgccaccgtcgccggcgcgatgatcaccggacgcgacatctacgacgtgctggcggcgatcgtgccgctgtacgtggcgatgttcctggcgtacgggtcggtgcggtggtgggggatattcacgccggaccagtgctccggcatcaaccgcttcgtcgccgtcttcgccgtgccgctcctctccttccacttcatctccaccaacgacccctactccatgaactaccgcttcctcgccgccgactcgctccagaagctcgtcatcctcgccgcgctcgccgtctggcacaacctgctctcccgctaccgccgcaatggcggcgccgccgcgtcgctcgactggaccatcaccctcttctcgctgtccacgctgcccaacacgctggtcatgggcatcccgctgctccgcgccatgtacggcgacttctccggctcgctcatggtgcagatcgtcgtgctccagagcgtcatctggtacaccctcatgctcttcctcttcgagtaccgcggcgccaaggcgctcatctccgagcagttcccgccggacgtcggcgccagcatcgcctcgttccgcgtcgactccgacgtcgtctcgctcaacgggagggaggcgctgcaggcggacgccgaggtggggcgcgacggccgcgtccacgtcgtcatccgccgctccgcctcggcctccaccacgggcggcggcggcggcgcggcgcgctccggcgtgtcccgggcgtacggcgcgtccaacgccatgacgccgcgcgcctccaacctcaccggcgtggagatctactcgctgcagacgtcgcgcgagcccacgccgcgggcgtccagcttcaaccaggccgacttctacgccatgttctccggcagcaagatggccagccagatggctagccccatggcgcagcacggcggcgccggcggccgcgcccagggcctcgacgagcaggtcaccaacaagttcgcctccggcaaggccgccgacccgccgtcgtatcccgccccgaaccccggcatgatgccggcgccaaggaagaaggagctcgggggctcaaactccaactccaacaaggagctacacatgttcgtgtggagctctagcgcgtcgccggtgtcggaggccaacctccgcaacgccgtcaaccacgccgcctccaccgacttcgcctccgcgccgccgccggcagccgttcccgtcggcggcgccactcccaaaggggtgagtggcagtgtcacgccggcggcgaagaacggcggcggcgagttggagatcgaggacgggctgaagagcccggcggcggggctggcggcgaagttcccggtgtcggggtcgccgtacgtggcgccgaggaagaagggcggcggcgccgacgtgcccgggctggcggaggcggcgcacccgatgccgccgacgagcgtgatgacgcggctcatcctcatcatggtgtggcgcaagctcatcagaaaccccaacacctactccagcctcatcggcctcgtctggtccctcgtctccttcaggtggaatatccaaatgccttcaataataaagggctcaatatcaatattgtcagatgcagggctaggaatggctatgttcagcttaggcttgttcatggctctgcaaccaaagatcatttcttgtggcaagaccgttgcgacatttgcaatggcagtgaggttcttgactggtccagctgttattgcagctacttccattgccattgggctcaggggagtactcttgcatgttgccattgttcaggcagcacttccacaaggcattgtcccgtttgtgtttgccaaggagtacaattgccatcctcaaatacttagcacagcggttatttttgggatgctcatcgcgcttccgatcacgatactctactatgtgcttcttgggatatagtgttcttgaagaaggcaaaaaagaaagagtagggaaaaaaataggattctaggtttctagaggaaaatgcaaaagaaatatgatatgggctttcttgaagacctgaagaactaccagagctgaagaatagggaaatgagatcaagtaggatcctagctagagagaaatgcaaaggaaagacaccccttgattacaattttttaattttttctgcaactgttttggcatcaaagtaaaggttagggccttgagtatgaagagttcagccgttaatttgacaagttgggttggcggtactaaagattccaccagttgattccctttgttcaaacacacattatcgctctgcacatttttgcttgatctttgccacagctgcaaaggtaactgtagtaacttcgatcctacactgggataaattaaagtaatacatgatgtttccacagtgcatggcaaga

SEQ ID NO: 98 - DNA, 1422 bp, Oryza Sativa
tccacagcgatcaaccgcattacacttggttaattaattaattctccattagcagctagctagggttctagggttaatttagttgatcagttcgccggaaccggagaagaagaagaagatgatagggtggggagacgtgtacaaggtggtggcggcgacggtgccgctctacttcgcgctgttcctgggctacgggtcggtgaggtggtggcggatcttcacgagggagcagtgcgacgccgtgaaccggctcgtcgccttcttcgcgctccccttcttcaccttcgagttcaccctccacaccgacccgttccaggtgaactaccgcgccgtcgccgccgacgtgatctcgaaggcggtcatcgtcgccgtcatcggcgcctgggcgcggttcatgagcaagggcggctgcgccgtgagctggtccatcaccagcttctcgctgtccacgctcaccaactcgcttgtcgtcggcgtgcccatggcgcgcgccatgtacggcgagtgggcgcagcagctcgtcgtccagctctccgtcttccaggccattgtctggctcacgctgctgctcttcgtgctcgaggtcaggaaggccgccatcgggatgtacgtcgacggcgccgaggcggcggcggcggccggcaaggacgtcgaggccgccggcgccgccgccgccgcaggcacggtcgtcgtcgccgccgccgcgggcaagccgtcgctgtgggcgctggtgaaagtggtggcgcacaagctggcgcgcaaccccaacacttacgccagcttcgtcggcatcacctgggcctgcctcgccaataggttacacatcgcgttgccgagcgccttcgagggatcggtgctgatcatgtccaagtcaggcacaggaatggccatgttcagcatgggattgttcatggcgcagcaggagaagatcatcgcgtgcgggacgagctttgcggcgctggggctggtgctaaagttcgcgctcggccccgccgccatggccatcggctccatcgccgtcggcctccgcggcgacgtcctccgcgtcgccatcatacaggcagccctacctcaatccatcacatcattcatatttgcgaaagaatacgggctgcatgctgatgtgctcagtactgcggtgatttttggaatgcttgtctccctacccttgttagtcggattttacatagttttagagctaattaggtagacgcagagccaatggtacatcaggaaaacatagtttttccttgagaattccaaaacatacatactgacaacaaatgttgcaaaatatctcctgccaacattcctcattgcataaaactgtaatgggagtatcgagttctatggaatacttttaacacgttatgtaacaagaatgtatacttattctgttattcaaaagaatgtgttacagta

SEQ ID NO: 99 - DNA, 1197 bp, Oryza Sativa
atggcgccgctctacttcgcgctgggcctcggctacggctccgtgcggtggtggcgcctcttcaccgccgaccagtgcgacgccgtgaaccgcctcgtcgcctgcttcgccgtccccttcttcgccttcgacttcgccgcccgcatcgaccccttcgccctcagctaccgcgtcctcgccgccgacgcgctctccaagctcgccgtcgcgctcgccctcgccgcctgcgccgccgccgcctccacccgctgctgcggctccggcggaggcaagcgcggcggcggcggcgggttctcgtggtgcatcactgggttctcgctggcgacgctgaacaacacgctcgtcgtcggcgtgccgctgctggacgccatgtacgggaagtgggcgcgcgacctcatcgtgcagatctccgtggtgcagaccatcgtctacttcccgctgctgctgctcgcgttcgaggtgaggcgcgccaccacggcggcggcggcgccgccgccgccgccgacggggaccgacgacgacgacgtggaggacggcgccgccgcggcggcgacggcggcggcggcgaggcggtcgctgtggccgctggtgagagcggtgtggctcaaggtggcgcgcaacccgaacgtctacgcgggcgttcttggcgtcgcgtgggcgtgcgtcacaaacaggtggcatgtcgaaacgccaagcatcatagaggggtcagtgctgatcatgtccaagaccggggttggactctccatgtttagcatgggtttgttcatggcgttgcaggacaagatcatcgtctgcggcgccggcctgaccgtgctgggcatggcgctgcggtttgtcgccggcccggccgccaccgccgtcggcgccttcgccctcggcctccgcggcgacctcctgcgtcttgccatcatacaggcatacacacatttacacgaaattcattcgccaagttctttttttcttctttcacctgaaatttgtctgaattcaaacggatgcatgcatgacacaagtcctcacgatgaaactgctcgtgatgaacaggctgcgcttcctcaatccatcacgacgttcgtgttcgcaaaggagtacggcctgcacgccgaaatactcagcacagcggttatattcgggacactggcgtcattaccggtgttgatcgtgtactacattgttctaggcttcatacgatga

SEQ ID NO: 100 - DNA, 1142 bp, Oryza Sativa
atggtgtcctggaaggacatctacctcgttcttgaagcgacagttccactatatgtagctatgatactggcctacctatccataaaatggtggaagctgttcaccccagagcagtgctctgggatcaacaagtttgtggcgaagttttctattcctctgctctcttttcaggtcatttccacaaccgatccttatgacatgaatatcaagctcatatactcggatatcctacaaaagtcgcttgccttgctgggatttgcagccatttccaaagcatgctgtgcagagaagtttgactggctgattactggtttttctttatcaacacttcccaatacactgattgttggcatcccgttgctgaaaggaatgtatggtgagcaagccggcaaactactaagtcagatagtagtcctccagagcctaatttggtacactcttcttctatttttgtttgaacttcgggctgctaatggaatggccaccactacatcatctgaaactacaggtttaatttgggcactggtcggcttcaggtggcacataagattaccgttgattgtcagcaattctataaggatgctctcggatggagggctgggaatggcaatgttcagcctaggccttttcactgctctacaaactaaaattatagcctgtggagctaaaaggatgctactagcattagccatcaggttctttctaggaccagcactaatgggtatgtcttcttatgctattggaatgcgtggagtattgctgaagatagccattgtacaggcagctctacctcaaggaatagttccgtttgtgtttgcaaaggagtacaatgtccaagcagatattctgagcactgcgataattgttggcatgatggttgcagttcctgtggcgctggcttactactttgcaatgatcatcccagctatcaaataactatttgcagaagctagcctgattgtgttcatttgagaaaacaatgacggctcgctgtggagaataagttcagttatgagtgaatattttgctagactgtatatatatgtgcccttgggtttgtggtgaaccataataaggatatctgatttgtatcttagtgcatagtggccatacataattcttaccgtttcaactatgaacaa

SEQ ID NO: 101 - DNA, 1763 bp, Oryza Sativa
aaactctcacactacaacaaccacaacacactactactagtgagactagtaagcgtcatcacgagatccaggtttaatagatcgtttaatctaccaccgttgatttagaaaggggttgaggggagggtagtagtagctaagttagggcaaagatgattacgggttcggaggtgtaccaggtggtggaggcgatggcgccgctgtacacggcggcggcgctggggtacgggtcggtgcggtggctgaaggcgttctccaacgagcagtgcgccgggatcaaccacttcgtggcgctctacgccgtgccggtgctcatcttcgacatggtgtccaccaacaacgtgtacaagatgaacggccgcctcatcgccgccgacacgctgcagaaggccgtgctgctgctgggcctcatggcgtgggcgctctgggagcggtcgcgcgcgcgcggcgccggggccaaggccaaggcggcggtgtcgtcgccgctgcagtgggtcatcacctgcttctccgtcgcgtcgctgcccaacaccatcatcatgggcgtcccgctcctcaacggcatgtacgggcccgtgtccaaggacctcatgaagcagatcgtcgtcatgcagttctgcatctggtacaacgtcatcatcttcctctacgagtacatggcggcgcgtagatcggcctcggcgccgccgccggcgtcgtcggagggcagcgccaagatcagcccttcgtcgccggtgaaagctgctgcggcggcggcggacacaaacggcaatgctgtcgcggccgaccggccgcaagaagtggcggtgaacatcgaaatcacggagatggcggcgtccacggcacgagacggcgtgtccggcgagacgacggcggccgccaaggaggtgagctctggtgaagttgctccggtggaagaggaggaggcgtctgcgccagcgccgtcgatgaagcacgtcatctggatggcggtgaagaagctgctacagattccgaatacctatgcaagcttccttggcctcatctggtctctaatcgcattcaagtgtggattctcgatgccaaaaatcgtcgaggactctctgttcaccattcgtaccaccgctgtaggcctaagcatgttttcttcagggacgttcatagcgcggcagtcgcggttcgtgccgtgcggatacaagatagcgtcgttctccatggtcatcaagtttctgataggcccggttgtgatgctgttcgcctcgctcgtcatcggcatgcacggcacacttctgcacatcgctgttgtgcaggcggctctccccctggcagtgacatcatttgtgtacgctgaagagtacaaggtccacgcagacatcatgagcacaggggttattcttgggatatttatatcacttcctgtgacaattgtttactatattctgttggggctgtgagcctgtgattgagacatctaaatttagtcgaaggctaattaaagttgcatgtgtgctgatgtgcatatatgtaggaagacagaatacaaacagtaaaaatactgaaggatgacaacaaggtgaattgatttccctccggagcctgaagattggggttctggcgagagatacagtgagatgtgactgtaatgtttggtaataataagatgtcacaaaaacgcggcatatatgctgaaacttttgcaatgtacagcaagtatacaatgaacagggcttattacagcccaccagttgattcttcgaaatttaaaacgtaagcaaactgagtac

SEQ ID NO: 102 - DNA, 1668 bp, Oryza Sativa
atggcaatggccaccgccaccgcctcctcctgcgtcgacgccacgtggtgggcgtacgccctcccggcgctcctcggcgccgacaccctctgcgcccacccggcgctgctcgccggcgccgtcctcctggccttcgccaccgccgcggtgctcgcctgggccgcgtcccccggcgggccggcgtgggcgcacggccgcggccgcctcggcgcgacgcccatcgaggggccccgggggctccccgtgttcggcagcatcttcgcgctctcccggggcctcccgcaccgcgcgctcgacgcgatgtcgcgcgacgcggcggcgccacgggcgagggagctcatggcgttctccgtcggggagacgccggcggtggtgtcgtcgtgcccggcgacggcgagggaggtgctcgcgcacccgtcgttcgccgaccgcccgctgaagcgctcggcgcgggagctgctgttcgcgcgcgccatcgggttcgcccccagcggcgagtactggcgcctcctccgccgcatcgcctccacccacctcttctcccctcgccgcgtcgccgcgcacgagccggggcgccaggccgacgccacggcgatgctgtccgccatggccgccgagcagtccgccaccggcgccgtcgtgctccgcccccacctccaggccgccgcgctcaacaacatcatgggcagcgtgttcggccggcgctacgacgtctcctcctcctccggcgccgccgccgacgaggccgagcagctcaagagcatggtgcgcgaggggttcgagctcctcggcgcgttcaactggtccgaccacctcccatggctcgcccacctctacgaccccaaccacgtcgcccgccgctgcgccgcgctcgtcccccgcgtccaggcgttcgtccgcggcgtcatccgcgaccaccgcctccgccgcgactcctcctccaccgccgccgacaatgccgacttcgtcgacgtcctcctctccctcgaggcccacgagaacctcgccgaggacgacatggtcgccgtcctctgggagatgatatttcgtgggacggacacgacggcgttggtgacggagtggtgcatggcggaggtggtgaggaacccggcggtgcaggcgaggctgagggcggaggtggacgcggcggtgggcggcgacgggtgtcccagcgacggcgacgtggcgcggatgccgtacctgcaggcggtggtgaaggagacgctgagggcgcacccgccggggccgctgctgagctgggcgcggctggccaccgccgacgtggggctcgccaacggcatggtggtgccggcgggcacgacggcgatggtgaacatgtgggccatcacccacgacggcgaggtgtgggccgacccggaggcgttcgcgccggagcggttcatcccgtcggagggcggcgccgacgtcgacgtccgcggcggcgacctccgcctggcgccgttcggcgccgggcgccgcgtctgccccggcaagaacctcggcctcgccaccgtcaccctctgggtcgcccgcctcgtccacgccttcgactggttcctccccgacggctcgccgccggtgtccctcgacgaggtcctcaagctctccctcgagatgaagacccctctcgccgccgccgccaccccccgccgccgccgcgccgcctga

SEQ ID NO: 103 - DNA, 1687 bp, Oryza Sativa
aagtactaccataactaccccacccaacaccatcatctgatccatttccacaaagcttctgaaagccaacacatacctcactgcctttgccttcttctcagcttcaagaagccttttgagcttgtgatttctacatcatccatccatttcatcaccatgatccaagaactccttggagggacaaccatggaccagctcaagggcgccagcgctctgaaccacgcctccctgccggtggtgctgcagcctatcgtgtccaacccgtcgcccacgtcgtcgtcgtcgacgtcgtcgcgctcgtcggcgcaggcgacgcagcagaggtcgtcgtcggcgacctcgtcgccgcacgggcaggggcagggtggcggcgcggcggagcaggcgccgctgcggtgcccgcggtgcaactcgtcgaacaccaagttctgctactacaacaactacaacctcacccagccgcgccacttctgcaagacgtgccgccggtactggaccaagggcggcgcgctccgcaacgtccccatcggcggcgggtgccgcaagccgcgccccatgccggcgccggtcgccaagccgcccatgtcttgcaaggccgcgccgccgctcggcctcggcggcgggccagtgtcctgggcctccgggcagcaggccgccaccgcgcacctcatggcgctgctcaacagcgccaggggagtgcagggccacggcggcagcaatgtccaccggcttcttgggctggacaccatgggtcacctccagatcctgccaggcgctcccaatggcgccggcgccggcacggcggcgtcgctctggccacagtccgcgccgcggccggtcactccaccgccgccgcacatggactcccagctcggcatggggacgctgggccaccacgacgtgctgtcgagcctcggcctcaagctgccctcgtcggcgtcgtcctcgccggcggcgagctactacagcgaccagctgcacgcggtggtgagcaacgcggggcgcccccaggcgccgtacgacgtcgccaccgcgtccctcccttgcaccaccgcggtgacctcactcccgtcggcgctgtcgagcgtctccgccgccgcgccgaccagcaacacggtcgggatggacctgccacccgtgtcgctcgccgcgccggagatgcagtactggaatggcccggcggcgatgtcggtgccgtggccggacttgcccactcccaacggcgcgttcccatgagatagacgacggcgacgacgtcgtctcatgcaagcatgacattactagctagtgtagctctcgatcggtttagctttaatcatcatcgatcttgtgtggtttcggttaatcagtgtgaggactctgaggggtttaatcaagggtgttttagttactggtgtttttgttaatcagtggggatcgatcaagtaaccttttttactgtttacttattattaggtttttacctagggtttggtggtaactgggtatagtgtttaagtcgtgatcaatgcatagatggggttgtactatgagatgtgtacgtgtgttgtcggtttcgttcaggttgatccatgtatggatgtaaggtttacattccctgcaagctcgtggacgtacttatctcagctgcaaatttcactttcgacgtactctgaaatgcaaagtacagggcttgattgtagtaatg

SEQ ID NO: 104 - DNA, 1082 bp, Brassica napus
aaacttttaccctccaataattacaaaaacgccactcctctctctcccgccggagctcctcggaatctgagatggacgcaggaggaggattagtgtcttcggcgaagtccatactggagaagcctctgaagctcctcacggaagatgacatttctcagctcacccgcgaggattgccgcaagttcctcaaggacaaaggaatgcggaggccttcttggaacaaatctcaggcgatccagcaagttttatccctcaaagctctctttgagcccggcgacgactccggcgccggcatcctccgcaagatcctcgtttctccgaatcccactcgcgtcacagcaacctctgctgagccagcgagcgaagtcggagcacggattccttttcaggaagatgacagaagagattctccaagatcggctgagttctccggctccgagaaagacagctacaacactatctctcccagcagaagcccagcagaaacaagtgcgctggttgggcaaatgacgatattctatagtgggaaagtgagtgtgtatgatggtgtaccacctgaaaaggcgcggtctatcatgcactttgcagccaatccgattgatttgcctgaatatggtgtttctgcttctgctagaatgacatccaggcccatgagcagtaaagagaagatggttgaacctccccactatggccttgaaaaggcaaatgcttctcgtgattctgatgcggagggccaggctaacagaaaagtgtcgttgcaaagatatcttgacaagcggaaggatagcaggagattgtttaagaacaaaaaggcaccaggagttgcatcatctagcttggagatgtatctaaatcgtagtcagccagtgacaaacgcatattcacaaagccttagcggtggtggcactggaggagaacagcacgagtcacctgaaaatcagagaagaagtcccaatctatctgttgatctgaacagtgatttaaatagcgaaggggtcgaacaagaacagttaaaaagaaggcaaggaatgttctctagttcagaaacatggcacaagaaggttgagctggaggagtcttaa

SEQ ID NO: 105 - DNA, 2638 bp, Brassica napus
gccttttagcaaaataagatcatcaaaagggagattattcttattccttgtggtttgttttcattattagttatacttgcaggtgaaaaggaatatggcggaacagttgctgctgcatgggactcttgaagtgaagatatacaggatcgacaggttgcataaacgtggaaaattcagtttatgtggcactggcacggggaacaaggaaccggcggggaaaaagattcaatccccaatcaagaatctaacgtcctcatgcgcagatttactaggagggcatctctacgcaaccgttgacctagacagagcaagggtggctcgaaccacgatgagacgtcatcctaagtggttccaatcttttcatctatacgccgcacattcaatctccaaaatcatattcacagtcaaagaagatgaaccgatcagtgcgaatttaatcggccgagcttatttacctgtcaccgaagtcatcacaggacaacctgtagaccgatggctcgaccttttagacgagcacaagagtcctatccaaggaggttcgaaaatccatgtacgtgtgacgttcactagcgtaacacatgacgtgaactggaacaaaggtatcgttataccttcgttcaaaggagtccctaacgcatttttcaaccaacgagaaggttgcaaggttacgctttaccaagacgctcatgtcctcgaagattaccaggacattaccctctcgggaggacaagtgatatacagtcatcatcggtgttgggaagatatttttgatgcaatatgggacgcaaaacatttaatatatatcacaggttggtcggtctacaccgacataacattgatcagagatcctaaacggccgagacaaggaggtaacctgaagttaggagaattactgaagaagaaagcagaagaaaacgtgaccgttctaatgcttgtgtgggacgacagaacgtctaacgaggcattcaagagagacggtttaatgatgactcatgatcaagaaacttataattacttcaaaaacacgaaagtgcgttgcgttttgtgtccgcggaatcctgataacggtagtagcattgttcaagggtttgaagtggctgcgatgtttactcaccatcagaaaaccgttgtggtggacgctgaaagaaggatcgtaagttttcttggagggattgatctttgtgatgggaggtatgatactcaggagcatcctctattcggtactttgaataattttcattctaatgactttcaccagccgaactttgatggcgcatcgattaaaaaaggtggtccacgtgagccttggcatgacattcactgcaagctggatggtcctgcggcttgggatgttttgtacaattttgaacagagatggatgaaacaaggtagtggtagaaggtacctagtatcaatggaacggctctcagagatcacggttccgccactaccatttgtaaaatccgacgatgttgaaggttggacggtccaaattttccggtcgatagatgatggtgcggttctaggattcccagaggatcctcgtgaagcttccagcgtaggacttatcacgggaaaaaataacgtcattgaaagaagcatacaagacgcttacattaacgccataaggagagccaaacactttatctacattgagaaccaatacttcctaggaagctcctttggatggagttcaagagacgttaatataaacgagatcaacgctttacaccttattcccaaagagatttccctcaagattgtgagcaaaatcgaggcaggggagaggttttcagtgtatgttgtgataccgttgtggcctgaagggaaacctggttctgcttcggttcaagcaatactagattggcaaaggagaacaatggagatgatgtatactgatgtcgtcattgctcttaggaagaaaggtttagatgcaaaccctagagactacttaacgtttttctgcctcgggaaccgggaagttaacaaggcgggtgaatactcgcctccggagaaaccagcggccaattctgattacgcaagagctcaagaatctcgtcggttcatgatctatgtccattctaaaatgatgattgttgatgatgaatacataataataggatcagcaaatattaaccaaaggtctatggatggaggtcgtgactcagagatcgcaatgggagcataccaacctaaccatttgctatctaccaatcaaatgaagccaacgggtcaagttttcagctttaggatatcactgtggcttgaacatctacgggttataaccaatccattcatgttccctgaaagcgaagagtgcataagaatggtcaatgcaaaggcagacgagctatggggactatactcagcacaagtgtaccctcgagatcatgatctaccggggcacttacttagttatccgattagcattggtaccaacggggaggtaacagatcttgctggggctgagttgtttcctgatacaaacgcaaaggttttcggtgaaaaatctaattatctccctcccatcctcactacttaagtgatgtaacacttgcatcgcatactatatgcagaatttgtaatttcggttgtgttaatcaagtctagtttaaataaatttgagaataaaaaagag

SEQ ID NO: 106 - DNA, 3089 bp, Brassica napus
atggagaattatggatcacgatatccctacccttatccgcagtacccataccaaccttcttaccaatacccaccagctccttacagacctcccggtcccggttcagagcaataccaacctcctcctcccccttattatccttaccctcctccttacgcaaccccaccaccatatgcttcgcctcctccgcttcatcagcacgcttcaggctctcattctggccctttggactaccccccacaaccatcctcatctcctgagtatcaccgccattctttcgattaccgaccttctccttacccttctccttatcctcctcatccccagggcacctatgctcctcctcctcctcactatccctatcaagagcctgctgcccaatacgcccctcctgaaactaaaccccaggaccctactcctccccccccctctaaaactcaagcctttccagaataccgtaggcaagattgtctcacctctgtgcctaatgataacgtccttttgctgcatggtaattttgacatctggatctatcatgccaaaaacctccctaacatggacatgttccataagactctcggtgacgtttttggaggccagctcaacaggaaaattaccagtgatccttacgtctctgtatctgtcgccggtgctgttattggtagaacctacgttatgagcaacagtgaaaaccctgtctggatgcagcatttttatgttcccgttgctcatcatgctgctgaagttcattttgttgttaaagacagtgatgttgttggttctcagcttattggattggttacaatccctgtcgaacagatctactctggcgccaaaattgaaggcacttttcctattctaagcagtaacggcaagccttgtaaacctggtgctaatttatcactatccatccagtatacccctatggagaagcttagtgtttatcatcatggtgttggggctggtcctgattaccagggggtgcctggaacttattttccccttagaaaaggcggaactgtgaccttgtaccaagatgctcatgtccctgaaggtatgctccctggtattagacttgacaatggaatgtcttaccaacatggcaagtgttggcatgatatgtttgatgccatacgccaggccaggcgtttaatttatatcactggttggtcagtctggcacaaagttaggctggttcgggataaagtaggtcccgcctcagcatgtactcttggtgagctcctaagatcgaagtcccaagaaggtgtgagagtcctgcttttggtttgggatgatccaacttcacgaagcatattgggttataaaacagatggtgttatggccacgcatgatgaggagacacgccgtttcttcaaacactcctcagttcaagtcctgctctgcccccgtaatgctggaaagcgacatagttgggtcaagcagagggaagttgggacaatctatacacaccaccaaaaaaacgtaatagtggatgccgatgctggtgctaacagaaggaaaattgtagctttcgtcggtgggcttgatctgtgtgatggccgatatgacactcctcaacatccgttgtttaggacactacaaacaattcataaagatgactttcacaaccccacctttacgggaaacctttctggatgtccaagagagccgtggcatgacttgcacagtaagattgatggcccagctgcgtatgatgtgctaaccaacttcgaggagaggtggttgaaggctgcgaagcctagcgggatcaagaagtttaagacttcctatgatgatgcgttgttgaggatcgataggattccagatatagtaggagtttctgatacccctactattagcgagaacgatcctgaggcttggcatgttcagattttccgttcaatcgattcaaactctgtaaaaggtttcccaaaggatccaaaagatgctacatgcaagaacttggtgtgtgggaagaacgtgctcattgatatgagcatacacacagcctatgtcaaggcaattcgtgcagctcaacacttcatatatattgagaatcaatatttcattgggtcttcctacaactggaatgcgcacaaggacataggtgctaataatttgattcctatggaaattgcgttgaagatagctgaaaagataagggcaaatgaacggtttgctgcatatatagtcattccaatgtggccagaaggtgttccaactggtgctgctacccagaggattctgtactggcagcacaagacaatgcagatgatgtatgaaactatctacaaggcgttagtggagaccggccttgagggagcattctccccacaagattacctcaatttcttctgtcttggcaacagagaaatggtggatggaatcgataactcgggaacaggaagtccaagcaacgcaaacactcctcaggcattgagtcggaaaagcagaaggtttatgatctatgttcactcgaaagggatggtcgtagatgatgaatacgtagtaattggatcggcgaatataaaccagcgatcaatggaagggacaagagatacagagattgcaatgggagcttatcaaccacagcatacatgggcaaggaaacattctggtccaaggggtcagatatatggatacagaatgtcgctgtgggcagagcatatggcaacgttagatgactgtttcacgcagccagagagtatagaatgtgtaaggaaagtgaggacaatgggggagagaaactgggaacagtttgcagctgaagaagtgtcagacatgagaggacatctgttaaagtatccagtggaagtggatcggaaaggcaaagtccgaccactgcctgggagtgaggcgttcccggacgtgggaggtaacattgtcggatcgttcatagctatacaggagaatctaaccatttgacatacaaatactgaaccagtggttgtggatatttatttattgagagttggaaattggttaacgatttaactttttacacattgggttgggtggagggtatataaagaataaaaatgattcatatttgtggtgtacaaactggttaatgtatttgaagtttcttc

SEQ ID NO: 107 - DNA, 4398 bp, Brassica napus
atggaagggtcaagtaacggttctttgagattagtgttgttacatggtaacttagacgtttgggtgaaggaagctaaaaatcttcctaacatggatcgttttcggaggtacaagaagaacagtacaagtgatcccttcgtgactgtctctatcgcaggtgcaaagataggcacaacttttgtggtcgacaacgatgagaatcctgtgtggaagcagcatttctatgtaccggtggctcaccatgctaaggtggtaaagtttgtggtgaaagacagtgaccgttttggagcaaagttcataggagatgttggaatcccaaccgaggagttatgttcaggaaacacgatcgaagggctgtttccgatacttgatagtagtcggaagccatgtaaaaagggtgctgtgttgagtttggctattcaatacactccagtggaaatgatgaaattttaccaaatgggtgttggtaatgagtgcgaaggagttcccggtacatacttccctttgaggaaaggcggtagagttactctgtatcaagatgcccatgttgaagacgggacacttccgagtgtagatctcgatggtgggatgaagtatatacatggaaagtgctgggaggatatgtctgatgcgattagacaggcaaagaacttgatttatatcacaggttggtcagtttaccattcggttaggctggttcgtcgcaataatgatccgaccaatggtacattaggggatttgcttaaagaaagatctcaagaaggtgttagagtgttgctattggtgtgggatgatccaacttcaaggagctttctggggtacagaacacgcggatatatgaagacaagcgatgaggagactcgccatttttttaagaactcgtcggtgcaagttattatttgtcctagatctgggggaagaggtcttcatagctttgtaaaaaaaactgaagttcaaactatctacacacatcatcagaaaactgtgattgtagatgctgaggcagctcagggtcgaagaaagatcgtagcgtttgttggagggatagacgtgtgcaaaggacgttttgatacgcctaagcatcctctctttacgacattaaagactcttcataaagatgatttctataacaattgttttgggactactgaggatgatggaccaagacaaccgtggcatgatctgcacagcatgattgatggtccagcagcgtatgacgtgcttgctaattttgaacaacgttggctaaaggcttcagagaaaaggcacaggatttcgatacacagatcgtcttctgaggatgctttgcttaagattgacaaaattccaaatatcatgggactatcagaagcttcttttgttgatgataatgatccagagtcttggcatgttcaggtttttcggtccattgattcaacctcagtcaaagggtttccagaggactcaaaggaagctagtgcaaggaatcttcaatgtgggaagaatatacttatagacatgagcatacacacggcttatgttaaggccataagatctgctcagcatttcatttacattgagaaccaatatttttttggatcatcatttaactgggattcacataaaaccgttggtgctaataatctaatccctatggaaattgcgcttaagattgctaataaaattagagcaagagaaaattttgctgcttatattgtcattccaatgctgccagaaggtgatccaacgggtatcgttacgcagagcattttacaatatcagtataaaaccatgcaaatgatgtatctaactatctacaaggcacttgtggaagctgaacttgatggtcagtatgagccacaagactatttgaacttcttctgtcttggaagcagagaggttgctgatggaaacgttaacaacaacacaaaggaagaagatggcccacaggtggaagctttgaagagtcgaagattcatgatatatgttcattccaaaggtatgatagtggacgatgagtttgtcttaattggttctgcgaatatcaacgagagatccctggaaggatctagagacactgaaatcgcaatgggaggatatcaaccacaccactcatgggctaagaaaggttctcatcctcgtgggcagatctttggatacagaatgtcgctgtgggcggaacatctagggtctctagagaaaggtttcgaaaatccagagaacatggaatgcgtgagacgagttaggagattgagtgagcttaactggagacagtatgcagcagaggaagtcacagagatgacaagtcatcttctaaagtatcccgttcaagtcgatagggcaggcaaagtgagttctcttcctggatgcgagacattcccagatgtgtttgtggatcctgctagacacttgtgtcatcctgaccaaagggatgcgattctggatttcaagaacaaattccagattcaaaagccttgtcttgaccgacgtctaaagtcatgggagaataacagcgattgttgttcatgggacggtatcagatgtgatgccagtttcggggatgtgatcaagctgaaccttagtgacagttgcctccatggtcagttcaattccaacagtactatctttctgcttcagaggcttccttttttaacaactctcgacctttcaagtaatgagctcagtggtaatattccatcttcacttggaaacctttcaaagctaaccactcttgacctttcaggtaatgatttcagtggtgaaattccatcttcacttggaaacctctctaagctcaccactcttaataatctctcccaaaacaaatttactggtaaagttccatcttcacttggaaatcttttgaatctcactgagcttatcctttgtgctaacaactttgttggtgaatttccatcttcatttggaaacctttcacatctcactgttctcgacctctcacaaaacaatttcgttggtgaaatctcatctttttttggcagttcggatcatctcactgacatggatgttggaaacaacatccttcatggtaactttcctcttaaactactaaatctaacaaagctgatttccatatcaatcagcggaaatcaattctcgggcatgcttccacctaacatgggctcactctccaacttggagttcttttacgtagaacacaacacttttactggacctatcccttcttcttctctctttaccattccttctttaacttatattgatttccttggcgataacaacttcatgggatcaatcccccgatccatctccaagttggtcaaccttgacacacttgatctttctcatctcaacacccaaggatgcggtatcttcgagtttccggagctcttacgaacccaacgcaacatgaaaacactagacatttctaacaacaaaatcacaggtcaagtgcctggatggttatgggagcttccaattattgaatacgtgagtacttccaacaacacattgattggttttgaaagcccaacgaaacatgggatatcttatgtccggaaaacatctctgagttacttgtctggcgccaacaacaatttcacgggcaagatccctagtttcatatgtgagttgcgctctctaaccactctcgatttgtctaacaacaaattcagtggctcattccctagctgtctgggaaattttagcagaagtcttgaagttctaaatcttgacgtcggtcataaccgtctggtgggaaagcttccaagatcattcatccgtatccattttcttcaagttctgaatgtggagatcaacaaaatcagtgacacgtttcctttctggttgaggtctctgccggagttacaggttcttgtccttcgctccaacgcatttcatggagagattccaaggtccattggtctattgaaagagcttcatgtgctcaacttttcaaacaatgctttcactggccacatcccatcatcactgggaaacctggcagagcttgagtcactggatgtttcgcaaaacaatctttcaggagagattccacaagagcttgggagcctctcgttccttgcttacatgaacttctctcataaccagcttataggtctagtgccagggggaactcagtttctgacgcagccttgttcttctttcgaggacaacccgggactgtatggtccttcacttgatcaagtttgtggttgtatccacgcgacaacatgtcaacaatctgaaacgccagatccagatgaagatgaagatgaagaagaggtgctgagttggatagcagctgcaataggatttgtaccaggtgttttctttggattgacgatgggatacatactggtttcctacaaaccagagtggttcatgaaagcttttgtcccaaacaaacgcagacaccacaactcattgaagaggtga

SEQ ID NO: 108 - DNA, 3029 bp, Brassica napus
agccaaagaaagatcttaagattcacagctcactttttccgattcttccgtttctagtcaacgctccccttcctttcctctctccttcttctctccaaagttcacaacgttttagatctcaatcttgattacccgccaagtgtttgatctttttgtgttctgggttttcgatcttactactgaaagtctcaacctttagtgatggcgcatcatccaatttacacagagactctctcaatgggaggagggtcaagccacggtttcgggcagcaacccgtgccctttgccaccagcagcggatctttgcgtgtagagctgctgcacggtaacttagacatttgggttaaagaagccaaacaccttcccaacatggacggcttccacaaccgtctcggtgggatgctgtccggtctaaccaggaggaacactagcaaagatgagaagccctccaagatcacgagcgacccttacgtgaccgtctccatctcaggcgctgtcatcggcagaaccttcgtgatcagcaacagcgagaaccctgtgtggatgcagcacttcgacgtccccgtggctcacagcgctgctgaagttcactttgtggtgaaagacagcgacatcatcgggtcacagatcatgggagctgtcggaatcccaacggagcagctgtcttcagggaacagaatcgaagggttttttccgatactgaacagtagtgggaagccttgcaaacagggagccgtgttgagtttgtcagttcaatacactccgattgaaaggatgaggctttaccagatgggtgttggttttggtaacgagtgtgttggagttcccggtacttacttccctttgaggaaaggcggtagggttactctgtaccaggatgctcatgttgatgacggtacgcttccgagtgtgtatcttgacggtggtgtgcagtatagacatgggaagtgctgggaggatatggctgatgcgattaggcaggcgaggaggttggtttatattactggttggtcggtttaccatccggttaggctggttcgtcggaataatgatcccactgatggtacattaggggatttgctgaaagccaagtctcaagaaggtgttagagtgttggttttggtgtgggatgatcctacttcaaggagccttcttgggttcaaaactcaaggagttatgaacacaagcgatgaagagactcgccggttcttcaagcattcttcagtgcaagttcttctttgtccaagatctggagggaaaggtcacagcttcgtaaagaaatctgaagttggaactatctacacacatcatcagaaaactgtgattgtagatgctgatgcaggtcagaaccgaagaaagatcgtagcttttgttggaggtctagacgtgtgcaatggacgttttgatactcccaagcatcctctcttcaggacactgaagacactccataaagatgacttccataacccgaactttttgactactgcggatgatggaccaagagagccgtggcatgatctgcacagcaagatcgatggtccagctgcatatgatgtgcttgctaattttgaagaacgctggagaaaggcttcaaaatctcgcggattggggaagttaagatcggcttctgatgattcgttgctttccatagagaggattcaagacatcgtaggactatcagaagcttcttctgttaatgagaatgatccagagacttggcatgctcaggttttccgttcaattgattcaagttcagtcaaagggtttccaaaggacccaaaggaagctactggaagaaatctactgtgtgggaagaacatactcattgacatgagcatacacgcggcttatgttaaggccataagatctgctcagcacttcatctacattgagaaccaatattttcttggatcatcattcaactgggattctaacaaggacttgggtgctaacaatctgatccctattgaaatcgcgctaaagattgctaacaaaattagagcaagggagaagtttgctgcttacattgtcattccaatgtggccagaaggtgctccaacgagtaaccctattcagaggattctatactggcagcacaaaaccatgcaaatgatgtatcaaaccatccacaaggcacttgtggaagttggtcttgatggtcagtatgagccacaagactttctcaacttcttctgtcttggaaccagagaggttgctgatggaacagttagtgtatataatagtcctcgcactccacctaaatcaaacgcaaatgcaaatgctatacaggtgcaagctttgaagagtaggagatttatgatatatgttcattccaaaggtatggtagtggatgatgagtttgtcttgatcggttccgcgaatatcaaccagagatccttggaaggaactagagacactgaaatcgccatgggaggttatcaaccacaccattcatgggctaagaaaggttctcgtcctcgtggtcagatctttggatatagaatgtcgttgtgggcagaacacctagggtttctagagcaaggtttcgaggaaccggagaacatggaatgcgtgagacgagttaggcaattaagtgagctgaattggagacagtacgcagcagaagaggtcacggagatgcaaggtcatcttcttaagtatccagttcaagtggatagaacagggaaagtaagttctctccctggatgtgagacgttccctgatctcggtggcaagatcataggctcgttccttgctctccaagaaaacctcactatatgaaaactgaagcttgccttgtagtatcaacatttgtttctttttatttcttccacttcaagaaacctctctgagtgggatctgaatgaaagtgtgactttagggtttaattgtgcttttaaaaaaaattacgagatgtaaaattcttcattacagttgatcgtagtgtgcgttttggatttctgtgctagtccatctaatctcgttagcttgtttaacattttggatatacattttcgtattctccctaa

SEQ ID NO: 109 - DNA, 8151 bp, Brassica napus
atggatacacggtgcccgttctctccggctgaggtctccaaagtccgtgtggtccagtttgggatactcagccccgatgagatcaggcaaatgtctgttatgcacgttgagcatagtgaaaccacggagaagggaaaacctaaggttggaggattgagcgatgctcggctcggtacgattgatcggaaggtgaagtgtgagacgtgtatggctaacatggctgagtgccctgggcattttggtcatcttgagctcgctaagccaatgtatcacgtcggttttatgaagacggtgttgagtatcatgcgttgcgtttgcttcaattgctccaagatcttagctcatgaggaggagcataagtttaagcaggctatgaagataaagaaccccaagaatagacttaagaagattctggacgcgtgcaaaaacaagactaaatgtgctgatgatgataatctcgaggatgttcaagaccaagacgcagacggacccgtgaagaagatccgtggtggatgtggtgcagtgcagccgaagctgagtatcgaggggatgaagatggttgcagagtataaaaatacgaggaagaagaacgatgagaaggaccagcttccagagcctgcagcaatgaaacagacgcttggtgctgacaggattttgagtgttttaaagaggattagcgatgaagattgtcaactcctagggttcaaccccaagtatgctcgtcctgactggatgattctagaagtgcttcctattcctccaccccctgatgacttgactcatcagctagcaatgattatccgacacaacgaaaacttgaaacgacaggaaaagaatggagcaccagctcatattatatcagagtttacacagctcttgcagtttcatatagcaacttattttgataacgagatgcctggacagccaagggctactcaaaaatcagggaggcctattaaatcaatatgtagtagactgaaggcgaaggaaggcagaatcaggggaaatttgatggggaaacgagttgatttctctgcacgtactgttattacaccagatccaacgataaatatcgatgaacttggtgtaccgtggagtattgccttgaatctcacgtatccagaaacagttactccatataacattgaaagattaaaggagctagtggataatgggccacatcctccacctggcaagaccggggctaaatatatcattagagatgatggtcaaagactagaccttcgttaccttaagaagagcagtgatcatcacttggaacttggatacaaagtggagcggcacttaattgatggtgattttgttctgtttaatcgtcaaccaagtctgcacaagatgtctatcatgggtcacaggattaggatcatgccatactccactttccgactgaacttgtctgtcacttctccttacaatgctgatttcgatggtgatgagatgaacatgcatgtaccacagtcattcgagaccagagccgaggtgttggagctgatgatggttcccaaatgtatagtctctccccaggcgaaccggcctgtgatgggtattgtgcaagatacacttctaggatgccgtaaaatcacaaagagagataccttcatagagaaggatgtgttcatgaatacgcttatgtggtgggaagacttcgatgggaaagttccagctcccgcaattttgaagccttgtcctatttggactggcaaacaagtctttaatcttatcattccaaagcagataaatctattcagatactctgcatggcactcagatcaagagacgggatacataactcctggggatactcaagttcgaattgaaagaggggagcttctcgccggaaccctctgcaaaaagacacttggtaccggtaacggaagtctcgtccatgtcatttgggaagaagttggacctgatgcagctagaaaattccttggccatactcaatggcttgtcaactactggctactacaaaatggttttaccattggaattggtgacactattgctgattcgtcgacaatggagaaaattaacgagactatatctactgccaaaactgctgtgaaagaccttatccgtcagttccaggaaaagaaactggaccctgaaccggggagaactatgacagagacatttgagaacagagttaatcaggtcttgaataaagctcgtgacgatgctggaagcagtgctcaaaagagtttagcggaaaccaacaacctcaaggccatggtgacagcaggatccaaaggaagtttcattaatatctctcagatgacagcgtgcgttggtcagcaaaacgtggaagggaaacggatcccatttggtttcgaagggcggacgttgcctcatttcaccaaagatgactacggtcccgagagccgtgggttcgtggagaattcgtacctgcgtgggttgactcctcaagagttttttttccacgcaatgggaggaagggaaggtcttatcgataccgctgtgaaaacatcagagactggatacattcagaggcggttggtcaaggccatggaggatattatggttaaatacgacgggacggttagaaactcgttgggggatgttattcagtttctttacggggaagatggtatggacgctgtgtggatcgagtcacagaagctggactctttgaaaatgaagaagtctgagttcgataggacgttcaagtacgagattgatgacgtcaactggaatccaacgtacctaagcgacgaacatcttgatgacttgaaagggatccgggagctgcgtgatgtgtttgacgctgagtatcagaagctcgaggctgacagataccaactcggcactgagattgctacaaacggtgatagcacttggccgttgcctgttaacatcaagaggcatatatggaacgcacagaagactttcaagattgacttacgcaagatttcggatatgcacccggttgaaatcgttgatgctgttgataagttacaggagaggttgctggttgttcccggtgacgatgcactgagtgtagaagctcagaaaaacgccacgctgttctttaacatcttgcttcgcagcactctcgctagtaaaagagttttggaggagtacaggctcagccgcgaggcttttgagtgggttattggtgagatagaatcaagatttgtgcagtcgctggtagcccccggggagatgattggttgtgttgctgctcagtctattggagagcctgctacgcagatgactctgaacactttccattatgctggtgtcagtgcgaagaatgttaccctcggtgttcccaggttgagagagattattaacgttgctaaacggatcaagacaccttctctatctgtctacctcacaccggaagctagcagatcaaaggaaggtgccaagactgttcaatgtgctttggagtatactactctcaggagtgtcactcaagctactgaggtttggtatgatccggatccgatgagtactataattgaagaagattatgagtttgtgaggtcctactacgaaatgcctgatgaagatgtttctccggagaaaatatctccctggctgcttcgtatagagctgaaccgcgagatgatggtcgataagaagctgagtatggcggatattgctgagaagatcaaccttgtgtttgatgatgatctgacttgcatattcaacgatgacaatgctgagaaactgatccttcggattcgtattatgaacgatgagggaggaaagggagaagggcaagatgaatcagctgaggatgatgtgttccttaaaaagattgagagcaacatgctgacggagatggcgctcaggggtattccagacatcaacaaggttttcatcaaacaggttaggaaaagcaagtttgatgaggaggaagggttcaagacgtctgaagagtggatgttagatacggaaggtgttaacctgttggctgtgatgtgccacgaagatgtggatccaaagaggacaacaagcaaccacttgattgagattatggaagttctaggaatcgaggcggttcgtcgtgctttgctggatgagcttagagttgtgatatcctttgatggctcctatgtgaactaccgtcatcttgccatcttgtgtgatacgatgacttatcgcggtcatctgatggcgatcactcgacatgggatcaacagaaacgacactggccctctgatgaggtgctcgtttgaagaaacggttgatattctactggatgctgcggcttatgctgagacggactgcttgcgtggtgtgaccgagaatataatgcttggccagcttgcaccaattggaacaggagattgtgaactgtatttgaatgatgagatgctgaagaatgctattgagcttcagctccctagctatatggatggcctggagtttgttggaatgactcctgctcgctcacctttttcaggcactccttatcatgaaagcatcatgatgacaccaaactacctatcgactccaaatgtgtcagatgcacagttctctccatatgttagtggaatggccttttcaccttcttcatctccaggttacagcccagcatccccaggacaaagtcctgcttcccccggttatagcccgacttctccctactacagtcccacttcgcccatctacagtcccacttcccccatctacaggcccacctacagtcccacttcgcccacctacaatcccacttcctacagtcccacttcgcccacatacagtcccacttcgccctactacagtcccacttcgcccacatacagtcccacttcgccctactacagtcccacctcgcccacatacagtcccacttcgccctactacagtcccagttctcctggctctagcccaacaagtccttcctattctcccacttcccctagctattatagtcggacatcccgaacttacagccctacttcccctgcatacagccccacctctccatcttacatcgctacttcaccatcttacagcccaacatcgccttcttacggccctactccctacagccctacatctcctggctacagcccaacttcaccaagctacagtccaacctcacctagttacgggtctacgtctccaagctacaatcctcagtctgctaaatattgtccatctttggcttactctcctaacaatgcaagactatcaccagctagcccctacaccctacatcgccatcttactctcccacatctccatcgtattcaccttctagtccaacacactgtcccaggttcgagtttaatacactttaatctcccatacagctcaggagcaagccctgactacagcccaaacgcaggctactcaccaacacttcctggctattcttcttcatccaccggtcagtataccccacacgaaggctatgaaaatgacaagactggaaaagatgccagcaaggatgcagggcatgttgagaaaagggaagaaagagcgtttcaaaagcatctccacagtggatatctttgtgacactgttttcctaaaatatcaaaaactttatccgcagatgctacatttggctctcggtttattgttagccatggcggagaaagtatccgacgacgtgatgctgttacacggcgacctcgatctcaaaatcgttcaggcgaggaggttacctaacatggacttattctccgatcgcatgcgccgctgcttcaccgcgtgcaactcatgcgccaaacctccagaagacgacgaggatcccagaaacagagacggcggcgatcgcaacatccgcggccaccgtaaggtcatcaccagcgatccctacgtaaccgtcgtcgtccctcaagcgactctcgctcgcacgcgcgtcttgaaaaactctcaggatcctctctgggacgagcacttcaacatctccgtcgcgcacccgatgcctcacctcgagttccaggtcaaggacgacgacgtcttcggcgcgcagatcatcggcacggcgaagatccccgtgcaccagatcgcttccggccaacggatctccgggtggttccccgtcctcggcgcgtcggggaagccgccgaagaaggagacggctctctacgtcgacatgaagttcactccgttccatcagatcgaggcgtaccgtaacggaatcgccggggatccggatcggagaggcgtgaaacggacttacttccccgtgaggaagggaagcaaggtgaggctttaccaagacgctcacgtgatggacgggacgttgccggaggttggattggataacgggaaggtttataagcacggcaagtgctgggaggatatttgttacgccgtctccgaggctcaccatatgatttacattgttggatggtcagtgttccacaaggtgaggcttgttagggagcctacgaggaagttaccgagaggtggtgatttgacgcttggggagttgctgaagtataaatctgaagaaggtgttcgagttttgttgcttgtgtgggatgataagacttctcatgataagttcgggattagcacacctggagttatggggacgcatgatgaagagactaggaagtttttcaagcactcttctgtgatatgtgtattgtcaccacgctatgctacggacttgggattagttgttggcactctcttcacgcaccatcagaagtgtgttcttgtagatactcaagctgttggtaataatcgcaagatcacagctttcattggaggtattgatctttgtgacggccgttatgacacacctgaacaccggatattacacgatcttgacactgtattcaaggatgactttcacaatcctacatttccagctgctaccaaggctccaaggcaaccgtggcacgatttgcactgtaggctagatggccctgcggcatatgatgttctcataaactttgagcagcggtggagaaaagctacccgatggaaggagtttagcttacgtttgaagggaaaaactcactggcaagatgatgcattgatccggataggacgtatatcatggattctaagtccagtgtttaagtttctgaaggatggtacctcaattgttccggaggacgatccagttgtttatgtttccaaagaagatgatcctgagaattggcatgctcaggtattccgttctatcgactcaggatccgtgaaaggatttccgaaatatgaagatgaggctgaggcacagaatctggaatgtgccaagcgtcttgtagtagataaaagcatccagacagcatacattcagactatcagatctgctcagcatttcatatatatcgagaatcagtatttcctgggttcttcttatgcttggcctaattataaagatgcagcaggagctgacaatcttattccaatggagttggcactaaagattgttagtaaaatcagagctaaagaaagatttgctgtatatgtcgttataccattgtggcctgaaggcgacccgaagtctggacctgtgcaagaaattctgtattggcagagccaaactatgcagatgatgtatgatgtcatagtacgagaactgaaagcagtgcagtcagatgctcatcctctcgattaccttaacttttactgccttggtaaacgagagcaacttccagagaacatgccagcgacgaatggcagtgcggtatcggattcgtataagttccagcgttttatgatctatgtgcacgcgaaggggatgatagtagatgatgagtatgtactcatgggatctgctaatatcaaccaaagatcaatggccggcacgaaagatacagagatagcaatgggtgcatatcaaccccatcatacatggactaacaagggaagacacccacgtggccaggtgtatggatacagaatgtcactatgggcagagcatctaggcaaaacaggagatgagttcgtggagccttctgatctagaatgcgtgaagaacgtgaacgaaatcgctgaaggaaactggaaaaagttcacaaatattgaattctcagagctgcaaggtcacttgattaaatatcctctgcaagtagacagtgatggtaaagtgagctcacttccagattacgacagcttcccagatgttggtggcaagatcatcggagctcattccatggccctccctgatactctaaccacgtaa

SEQ ID NO: 110 - DNA, 2598 bp, Brassica napus
atggccaatgtgaaacaaagtggtttagtttacctccatggagatcttgaactccaaatcattgaggcacgatacttgcccaacatggaccttcactttgaaaggatccgtcgtgttttcaacacattaaatttgttcgataagcatagttcttctcctaagggtagccataggcgtacacgtaacaatataatcactagtgacccatatgtaactgtttgcctcgccggggccacggtagcccgtacccgtgttatttcaaattcccaaaatcctgtctggagcgagcattttaaaattccattggcacatccagtctctcaaattgagttttatgtaaaggataacgatgtattcggagcagatctgatcggaatcgcaacagtctctactgctaaaattaaactgggtgagacgatcaacggatggttcccgatcattggctcgccgaaaccagattctgctgttcgattggaaatgagatttgtaccgtatgaaaagaaccctctttataatcatggaattacatcaacaggagtggctaattgttattttccagtgaggactggtgggcacgtcactttgtaccaagacgcgcacgtgcacgacaacatgccagaaattgagttagaagacggagttttgtaccagcacgagcgatgctgggaagacatatgccactcaattttggaggctcaccacatggtctacgttattggttggtccattttccacaaagtgaagttggtgagggatcagtcgcggaaactacccaatggcggggatctcagtctcggtgatctgttaaagtataaatcacaagaaggtgtcagggtgctgttgttggtatgggatgatagaacttctcacagcaaatttttcattaacacgacgggagtaatgcaaacgcatgatgaagaaactcggaaattcttcaggcgctcttcagttacgtgtgtgctatcgccccgttacgctagtagtaagcttagcattttcaagcagcaggttgtgggcactgtcttttcgcatcatcaaaaatgtgtaattgtcgatacacaagcatccggtaacaacagaaagatagctgcttttattggaggacttgatctgtgtgatggtcgatatgacacacctgaacatagacttttcaagggtttagacacggtcttccagggtgattaccacaatcccacattttcaggaggaaccaaagcacctaggcaaccgtggcatgatcttcactgcaaaattgaagggccagcagcttacgatatactcataaactttgagcaacgttggaaaaaagctacaaaatggtctgagattggacaaaaattcaagagggtgactcgctggcacgatgattctctgataaaactggaacgaatctcgtggattttaagcccgtctacagcagttccaacaaatgatactttatgggtctctaaggacgatgataagcaaaactggcatgttcaggtcttcaggtctattgactcaggatcactgaaaggatttcctaaggatgttcataaagctcacgcacagaatctagtgtgtgctaagaatcttgtgattgagaagagtatacaaacagcttacatccaagctatcagatctgcacaacactttatatatatcgagaatcaatattttattggatcatcatttgtatggccgaattacaaagaagcaggtgctgataatctagttcccatagaacttgcactgaagattgccaccaagataagggcaagagaaagatttgcagtatacatagtgattccaatgtggcctgaaggagatccttcttcggcgcctgtacaagaaattctctactggcaggggcaaacaatgcaaatgatgtatgagatcatagcacgggaaataaagcacatggaccttgagaatgttaaccctcaagactatctcaacttttattgtttaggtaaccgtgaggagctgccatctgatcaaaattgtgtatcaagcagcggcgaaatggtcccagcatctcaaaaatggggaaggtttatgatatatgtacacgcgaagggaatggtagttgatgacgagtatgtgttattaggctctgcaaatatcaaccagagatcaattgcaggatcgcgagacacagagatagcaatgggagcctaccaaaaccaccaaacatggagccataggagtaaacaccctcgtggccaggtttatggttacaggatgtcgttgtgggcagagcacatgggaaagatagatgatatattcaaagaacctgaaaccctggaatgtgtgaagagagttaatatgataagtgaagataactggaagaaatacacagatgacagtttcgttcctttacaaggacatcttcttaagtacccactctccgttgatcacactggaaaagtaatccctttgtctggtttcaattcgttccctgacgttggaggtaaaattcttggtacacaaagattgctctcaccacataactcaactagaacattggcttgttacatatacatttgtgcaaagcctattatttgttcactatatacaaaatttgggacgttagtttcttttcgtttatcagcatga

SEQ ID NO: 111 - DNA, 2330 bp, Brassica napus
atggagcttgaggaacagaagaagttcttccatggaacactcgagattacaatcttcgacgcaacccctttctctcctacatttcctttcaattgtatatgtacgaagccaagaccagcttacgtgaccgttaagctaaacaagaagaaagttgctaagacaagctcagaacatgaccgtgtctggaaccaaacttttcagatcctctgcgcacatccggtttcagacacgacgatcacaatcacgctcaagactcactgttctgttctcggaagattccgaatctctgcagaacagattctcacttctaatacagcaattgtcaacgggtgctttcctctgactacaaataacggatcaacgaaacctaacttgaagctcaagtgtatgatttggttcagaccggcttatctagaaccgggatggtgcaaaacgctcgaaggagagccttttcaaggtattaagaacgcgagcttccctcagagatcgaactgcagagttgtattgtaccaagacgcgcaccataaagccacgtttgatcctagggttcatgatgttccttgtaatgcaagaaacctatgggaagatgtttataaagcgattgattgcgctaggcacttagtttacatcgcaggatgggcattaaaccctaatctcgttctcgtacgggacgatgaaacagagattccacacgcagtgggagtaacaatcggtgagcttctgaaacgcaaagcacatgaaggcgtagcggtgagagtaatgctgtggaacgacgagtcgtctctaccgatgatcaagaacagaggtgtaatgcgaacaaacgaccaaacagctcttgcttacttcagagacacaagtgttgtttgtagactctgtccaagatcgcacaagaagctccccacggctttcgcacatcaccaaaagaccatcacggtggacacacgtgtaacgaatacaaatacaaaagagcgagagatcatgagcttcctcggcggtttcgacctctgcgatggtcgttacgacacagaggagcattctctgttccgtacaatcgggacaagtgatgatttctatcaaacaagcctcgctggagctaagctaagcagaggaggaccaagagagccgtggcacgattgccacgtgtgtgtggtcgggcctgcagcttgggatgttttgaagaacttcgaacaaagatggaccaaacagtgtaacccttctgttttggtcaacacctcagggataagaaacttagtaagcagtgcaaacactgaagaagatgacaggaactggaacgttcaagtcctgagatcgatagaccacgtgtcggctacggagatgcctagaggcttacaggttgagaggagcgtacacgacggctacgtcgcagcgattcggaaagcagagaggtttatatacattgagaatcagtatttcatgggaggctgcgagcattgggaggggaagagcggaagcggatgcacaaacttgatcccggttgaaatagctttaaagattgcagctaagatacgagagagggagaggtttgctgtgtatatagtgataccaatgtggcctgaagggccaccggagagcgaaacggtcgaagagatgcttcattggacgagagagacaatgtctatgatgtataaaatcattggagaggcgatatgggaaactggagacgggtcgcatccgagagattacttaaacttcttctgtctcgcaaacagagaagagaagagagaaggagagtatgaagcagtttcgtcaccgcatcccaaaacacagtactggaacgcacagaggaaccggagattcatggtctatgtccactccaagatcatgatagtggacgacgcatacgttttaataggatcagccaacataaatcagagatcaatggacggttgccgtgacacagagattgcaataggttgctaccaaagaaatacaaccaagaccaatgagattcgagcttaccgattgtcgctctggtacgagcatacaggtggccagatcacagtggatgagttatctttctcggagccagagagtcttgaatgcgtccgaggattaagaacaatgggggagcagatgtgggatatttacagtggagaaaaggtcgtggacatgaacggtgtacacttggttgcgtaccccattagtgtgacgagagatggtgtggttgaggaaatcggcgacggagtttttcctgataccaagacgttggtgcgagggaaaagatccaagatgttgcctccggttctaacaacatgaaagaaaatgtcagaatcagaatcatgacttgcaatgttatatgtattaagtaa

SEQ ID NO: 112 - DNA, 3364 bp, Brassica napus
atgtcgacggagaaacttctcgccactaacggcgttaaatccgacggcgtcatcagaagaacggcggcgacggcgaattgtcttaccggcggaagtcagatattcgaagagcttccgaaggctaagatcgtctctgtctcgagaccagacacgactgattttagccctttgcttctttcttacaccttggagcttcagtataaacagttcaagtggacattacaaaagaaagcttctcaagttctttacctacactttgctttgaagaaacgtttgatcattgaagaactccacgacaagcaagaacatgttagagaatggttgcatagcttggggatctttgatatgcaaggatcagttgtacaagacgacgaagaaccagacgatggtgctcttcctctgcactacactgaagatagtgtcaagaacaggaatgttccttcccgtgcagcgttatcaatcatccgtccaacgataggccgatcagagacagttgtagaccgtgggagagccgcaatgaagggctacttgaatctgtttctagggaacttggacattgttaactccaaagaggtctgcaagttcctggaagtatctagactctcgtttgctagagagtacggttcaaagatgaaagaagggtatgtcacagtgaaacacctgagggaagtccccgggtctgatggtggccgatgctgtcttccttctcagtgtctaggctgctttggtaatagttgggcaaaggtttgggcggttctaaaacctggcttcttggcattacttgaagatccgttcagtggaaaacttctagatataatggtgttcgactcattaggtttccaaggtacaaaagagtcacccgagcaaccgcgtttggctgaacaggtgaaggaacgcaacccgttgcgttttggctttaaggttacaagtggtgacagaaccgtgaggctgagaactacaagctgcaggaaagtcaaagagtgggttaaggccgtggacgaggctggttcctacaatccacataggtttggttcgtttgcgccgcctagagggttgacatcagatggaagccaagctcagtggttcgtggatggccacactgcgtttgaagcgattgcttttgcaatccaaaacgctacatcagagatatttatcacgggttggtggttatgcccggagctatatctcaaacgcccgtttcaagatcatccgtctttgcggctagatgccttgctggagacgaaagcaaaacagggcgttaagatttatattcttatgtataaagaagttcaaatcgcgctgaaaatcaatagcatgtacagcaagaaaaggcttcaaaacattcacaagaacgtgaaagttcttcgttatccagaccatctgtccactggaatttacctctggtcccaccatgacaagatagtgattgtagattaccaagtctgcttcattggagggttagatctctgtttcggccggtacgatacagctgaacacaaagttggagattgccctcctcatatatggccaggaaaagattattataaccctagagagtctgaaccaaactcatgggaagaaacgatgaaagacgagctagaccgtagaaaataccctagaatgccgtggcatgaggttcactgtgctctctggggaccgccttgtcgcgatgtggctagacatttcgtccagaggtggaaccactctaagagaaacaaggcacctaatgaacagacgattccattgctgatgcctcatcaccacatggttcttcctcactacttgggaactagagagatcgatattatctcaacagctaaaccagaggaagaccctaacaaacctgttgttctatccagacaagactcattctcatctgcctcacctcctcaagacattcctttgcttctcccacaagaaaccgatgcggatttcgccactataggagatattaagtttgaaagaggttcaagacaagccctcgatggtcgagatgaatatcctggagaaacttcagaggaaagcgatagggatgagactgtgaacgagtggtggtggcagatagggaagcaaagtgattgcaagtgtcagatcatcagaagtgttagccaatggtcagctggtactaaccaacctgaagatagcattcatcaagcatactgttcactcatcgaaaacgctgaacattttatctacatagagaaccaattcttcatctctgggctagagaaagatgacacgatcctgaaccgcgtttctgaagccttatacagacgcattctgaaggctcatgaggagaacaagtgcttccgtgtcgtgatcgttataccgctcctccctggatttcagggaggcattgatgagtttggagcagctacggttcgagcactgatgcattggcaataccgttcgatctccagagacagaacttcgattctatacaaccttaaagctttgcttggtcccaagacgcaagactacatctccttctatggtctgaggtcgtacggacggttgttcgaggacggtcctattgccactagccagatttacgtgcatagcaagctactgattgttgatgaccggattgctgtgattggttcttctaatattaacgataggagcttactagggtcacgagattctgagataggagttgtgattgaagacaaagagttcgttgaatcttcgatgaatggagtgaagtggatggcggggaagttctcgtatagtctcagatgttcactttggtcggagcatcttggtcttcaacccggaaaggtgaaaatgattgaagatccaataaaagatgcaacataccaagacttgtggatggccacggctaagaggaacactgacatctacgacaaagtcttctcttgcatacctaatgaaaatatacgttcaaaagctgcattgagacacaatgtggctctttgtaaagacaagttaggtcatacgacgatcgaccttggcattgcacctgaaaagctaaaaccgtgcgacagcgactcgtgggagatgctgaaggaaacaagagggcacctcgtatgtttcccattacatttcatgtgtaatgaagaagatctcaggccgggtttcgtagaaactgagttctacactgctcctcaagtcttccactaatcactatttattggacatgcctctttatcctgattgggttaataggagactaatccggttactgaaaactatattagatggctaaaaagtctcacacgttttcatatgtatagagaagttagttatatagatacacaggtaatgagatcatttcttttgattgtttcttaggtttgagaaggtgtgtatgttatatagaagaataaaaaacttatttgtg

SEQ ID NO: 113 - DNA, 3651 bp, Brassica napus
ttttccctcagattcatcatctctatcgatcctcccaacgatccggtcatctgatcggaaactccctcaaggccaaaaaggatcacacgcgatttttagatcttgagaattcggagatcgagttggggaaattgcgatcaggtgatggcgtctgagcagttgatgtctcccgccggaggaggaggaagatactttcagatgcagccggagcagattccttcgatggtctcgtcgctattctccttcgcgccggctcctacgcaggaggctaatcgcatcttcgaagaattgcctaaagctgtgatcgtttccgtgtctcgccctgatgccagcgatatcagccccttcaagtggcagcttgtgaagaaagcatctcaagtattttacttgcattttgcattgaagaaacgtgcttttatcgaagaaattcacgagaagcaagaacaggttaaagaatggcttcaaaatctaggaataggggatcatgcacccattgtgcaagacgaagatgttgatgaagtccagttacatcaagaggagagtgccaaaaatagagatgttccttcaagtgctgctttgccagtcattcgccctctgggaagacagcagtccatatcagttagaggaaagcatgcaatgcaagaatatcttaatcactttctagggaatcttgatattgtcaattcacgggaggtttgcaggtttttggaggtctcgatgttgtcattttcaccagagtatggacccaaactgaaagaagattatattatggtaaaacatctaccgaagatttcaaagagtgatgattctgatagatgctgtggatgctgctggttctgttgctgcaatgataactggcagaaggtgtggggtgtactaaagccaggctttcttgcattgttggaagatccatttgatccaaagctattggatataattgtttttgatgtcctaccagtttctaatggaaatgatggtgctgatgtatcactagcagtagagctgaaggatcataatccgctgcggcatgcattcaaggtaacatctggaaaccggagtataagaataagggcgaagagtagtgcaaaagttaaagattgggtggcttctattaacgatgcggctcttagaccccctgagggttggtgccatcctcatcgctttggctcatttgctcccccgaggggtttaacagatgacggaagtcaggcccagtggttcgtagatggtggagcagcttttgcagccatggctgcggccattgaaaatgctaaatctgagattttcatttgtggctggtgggtgtgcccagaactctatcttaggcgcccttatgactctcatacatcttccagacttgataacttgttggagaacaaagctaagcaaggagttcagatatacatccttatatacaaggaggttgctcttgctttaaagatcaacagtgtatatagcaaacgcaggcttcttagcattcatgagaatgtgagggtacttcgttatcctgaccacttctctagcggtgtctatctctggtcccaccatgaaaaacttgtcatcgtcgatcatcaggtttgcttcattggagggttggacttgtgttttggccggtacgacacgtttgaacataaagtaggagataacccttctgtgacatggcctggaaaggactattacaaccctagagaatctgaaccaaacacttgggaggatgctctgaaagatgagttagaccgaagaaaatatccacggatgccttggcatgatgtgcattgtgctttatggggtccaccttgccgtgatgtggctaggcattttgttcaacgctggaactatgctaagagaaacaaagcaccatacgaagattcaattccgcttcttatgcctcaacatcacatggttataccccactacatgggaaggcaagaggagtcggacattgaatgcaagaatgacgaagacagcattaaagggattcgaagagaggattcattttcttctggatcatctttgcaggacattccgttacttttgcctcaagagccagttgatgaggatggttcgagtagggggcataaagcaaatggtactaacagtagaaatggcccattctctttccggaaatccaaaatagaaccagttgtgggagatactcctatgaggggctttgtagatgatcgtaatgggctacatcttccagtggcaaagcgtggttctaattcaattgattcagagtggtgggaaacacaagaacgtggttatcaggtcgggtcgccagatgagagtggacaagtcggtccgagaacttcatgccgctgtcagattatacgaagtgtgagccagtggtctgctggaacaagccaagttgaagagagtatccattctgcttaccgttctctcattgataaagctgagcattttatctacattgagaatcagtttttcatatcaggcctttctggagatgacacgataaagaaccgtgtcttagaagcgttgtacaagaggattttgcgtgcccataacgaaaagaaaagtttcagagttgttgttgttatacctctcctcccggggttccagggaggtattgatgacagcggcgcagcatctgttagagccataatgcattggcagtatcgaaccatgtacagaggacataattcaatattgaacaatctttacaaaaccgttggcccaaaggctaatgattatatctccttctacggccttagggcgtatggtaaactttccgaagatggacctgtcgccactagtcaggtgtatgttcacagtaaaatcatgataattgatgaccgtgcagcactgattggatctgccaatatcaatgaccggagtttgcttggctcaagggattctgagattggagtactaatcgaagacaaagaattggtagattcgcgcatggctggaaagccatggaaggctgggaaattttctttaagccttaggctctctctttggtcagaacaccttggacttcgtagtggagagattgatcagataattgatcccgtttctgattcaacctacaaggagatatggatggcaactgcaaagacaaacacgatgatatatcaggatgtcttctcttgtgtacccaatgatctcatccattcaagaatggcgttcagacaaagcatatcgtattggaaggagaaactgggacacacaacaatcgacttgggaatagcaccggagaagctggagtcttaccacaatggagacatcaagagaagcgatccaatggacagactaaagtcgataaagggacatctagtctctttccctttagatttcatgtgcaaagaagatctaagacctttcttcaatgagagtgaatactacgcatccgctcaagtctttcattgagatctcgaatctattcagcgactgttctacacgggaaaaaacttcattgctatctttaaccaattcatttcatatgtttatgggaaagaattaaagatgtctgtatagggagggatatgtgtgatgttggaaacaagagggaactcggaagagaagccattttgctatgttttggttgctctcttccgaggtaaagaaagaaccaattcattttctataagttaaatatttagtatattatactcgacttcacatttg

SEQ ID NO: 114 - DNA, 3155 bp, Brassica napus
atcagcggccctagtcttcgtttcgtatagtctccacacgcctctctctctcaccttcagtcgtcagacctcgcctccatgttcgtttccatctgattcatcatcaatcatccttcctataatcatcagaatcctcaatctgaaaccgtgatttgatttctctcaccatgtataaaaccacatcttcctccctccttcgagccgcttcttctcgctctccactcctctcctcccgatcgtccctgtctcaatcctcctcctcctccgccgcatccgcatctccttccccgccttcgtctcttctcggtcggagacctttcgccacttcctcacccgctttccgatcgcttcctcgatggagccattgccttcactccagactgtctccgtttcgcctcagctctcagatcagagccgtctctcccggtttagaccggctcgagaggaaattctcttccatggcgtcggagcatccgttcaaggggattttcactactcttcctaagcctggtggtggcgagttcgggaagttctacagcttgcctgctctcaacgatccaaggattgataaactgccttactctatcaggattctccttgaatccgcgattcgtaactgtgataacttccaagtcaccaaggaagatgttgagaagattatcgactgggaaaagactgctcctaaacaagtcgagattccgttcaagccagctcgtgttcttcttcaggactttactggagtccccgctgttgttgaccttgcttgtatgcgtgatgctatgaacaaactcggcagtgattccaacaaaatcaaccctttggttccagtggatcttgtgattgaccattctgttcaagttgatgttgctcgatctgagaatgcagtgcaagcaaatatggagcttgagttccagaggaacaaggagaggtttgctttccttaaatggggatctactgctttccagaacatgcttgttgtgcctcctggctctggtattgtgcatcaggtcaatttggaatatcttggaagagttgtgttcaacacccaaggcgttctctacccagacagtgtggttggaactgattcacacacaactatgattgatgggttgggagttgctggatggggagttggtggcattgaagctgaggcgacaatgcttggccagccgatgagtatggtattgcccggtgtcgttggattcaagctgtccgggaaaatgcgtaatggtgttacagctactgatttggttctaacagtgactcagatactcaggaagcatggtgttgttggaaagtttgttgagttttatggtgatggtatgagtggtctgtccctagctgacagggccacaattgccaatatgtctcccgagtatggtgcaaccatgggcttcttccctgtggatcatgttactctacagtatctcaaattgactggaagaagtgatgagactgtggccatgattgaagcgtaccttcgggcaaacaatatgtttgtcgactacgatgagcctcaacaagatcgagcttactcgtcatatctggaactgaacctggacaatgttgaaccttgcatttctggaccaaagaggccacatgatcgtgttcctttgaaggaaatgaaagctgattggaactcatgtctcgacagtaaagttgggttcaagggttttgcaatccctaaagaggcacaggaaaaagtggcaaacttttcctttaatggaaaaccagcagagattacacatggaagtgtggtgattgctgcgatcacaagctgtactaatacatcaaaccccagtgtcatgcttggtgctggtcttgttgcgaaaaaggcttgtgaccttggcctacaggttaagccttggataaagacaagtcttgcgccaggctccggagttgttacaaaatacttactaaagagtggactgcaagaatatctgaaccagcaaggtttcaatattgtgggttatggctgcactacgtgcattggtaactctggagaaattaatgaatcagtgggagctgctatcacagaaaatgacattgtggcggctgctgtgctttctggaaacaggaactttgagggtcgtgttcatccgctaacaagagccaactaccttgcatctcctcctctggttgttgcctacgctcttgctggaacggttaacatcgactttgaaacagagcctatcggcactggaaagaacggcaaggacgtcttcctaagggacatctggccaaccacggaagaaattgctgaggttgttcaatccagtgttttgcctgacatgttccgagcaacatacgagtcgatcaccaagggtaacccgatgtggaatgagctgtctgttcctgaaaacaccctctactcatgggatcccaagtcgacttacattcacgagccaccatacttcaaggacatgaccatggatcctccaggtccacacagtgtgaaggatgcttactgtttgctcaactttggggacagtatcaccactgatcacatctctccagctggaaacatccaaaaggacagtcccgctgcaaaatatctcatggagcgtggggttgatcgcaaggacttcaactcatatggaagtcgccgtgggaatgacgaaataatggccaggggaacttttgctaacatccgtatcgttaacaagctcatgaatggggaagttggacccaagactgttcacattccttctggagagaagctttcagtcttcgacgcagccatgaggtacaagtcatctggtgaagacacgattattctagctggagccgagtatggaagtggtagctcacgtgattgggcggctaagggacctatgctacagggtgtgaaagcagtgatagccaagagtttcgaaaggattcaccgaagcaacttggtgggaatgggaatcatcccgttgtgctttaagtctggtgaagatgcagacacacttggattgacgggtcatgagcgttacactatccatctcccaaccgatatctcagagataagacctggccaagatgttaccgtcactactgacaacggaaagtctttcagttgcacagtccgctttgacactgaggtggaattggcatacttcaaccatggaggtatacttccatatgtcatcagaaacttgagcaagcagtag

SEQ ID NO: 115 - DNA, 1602 bp, Brassica napus
agtaaatatcattaatcaaaaattacaaattaaaagagtattattatcatcatgtgcccatcccaaacccaatcctctctgttctctcgttatccaatcattttcgcgggttgatgataacagtggagtgcgacggcgacgacgacgacgttagggtttgatggcggtgaagaaggctagcgagatgttttcgaagagcttgatcgaggacgttcacagatggggatgcatgaagcagacgggcgtgagcctcaggtacatgatggagttcggttccactcccactgagaggaacctcctgatctcggcgcagtttcttcacaaggagcttccgattcggatcgcgaggcgtgcgatcgaactcgagacgctgccttatggcctctctgagaaacctgccgtcttgaaggtaagagattggtatgtggagtcattcagggacatgagagcatttcctgagatcaaggatactgctgatgagaaagagttcacacagatgattaaggccgtcaaagtaaggcacaacaacgtggttcccatgatggctcttggtgtgaaccagctgaagaaaggaatgaaactctacgaaaaacttgatgagattcatcagtttcttgatcgcttctacttgtcgcgtataggaatccgtatgcttatcgggcagcatgttgagttgcataatccaaacccaccacttcacactgtgggttacatacacaccaagatgtctcctatggaggtggcaaggaatgctagtgaagatgcaaggtcgatttgtttcagagagtatggttctgctccggagataaacatatatggcgatccaagtttcacctttccgtatgtaccaacccatttgcatcttatggtgtatgagctagtcaagaactctctacgtgctgtccaagagcgatttgttgactctgatagggttgcaccaccaatccgtatcattgttgctgatggaatcgaagatgttacaataaaagtctcagatgaaggtggaggtataccgagaagcggtctccccaaaatattcacctatctttacagcactgcaagaaacccgcttgaagaagatgtggacttgggaacagctgatgtacccgtgacaatggctggttatggttatggtctgccaattagtcgcttgtatgctcgatactttggtggagatttgcagatcatatccatggaaggatacgggactgatgcttacttgcacttgtctcgtcttggagactcgcaagagcctttgccatgagagtatctctcaagtcaggctagtgaagaaaggtttgacatattgatggtagacgaggggatccacttcactcagtttaatatgcttctttaatgtacatacattatttctcgcatttatgatttctttgattataaactcagacatggagattatccaagtgagttaatctcatctggtttgatttgagctgattcagaacagtttatcctttgttgcaacatttctcttgtatccgctagtaaaaaaaaaaagttaattttactggtaagtttaaattttgttattaatgtaagttctttcataatttgtatatttgattttaaatggtaaattaa

SEQ ID NO: 116 - DNA, 1662 bp, Glycine max
agaatttatttgtatttggagagaagaagaaataaagcttatagttatagtgagaagagaaggaagattagttgctaataattaagacagaaacatacgtggcagcttagggttcaccccaagtcctaaaaacgccccctccctacccttcccccatttcccccccaacccaaacgctgccaacaacaacactctctctacaaaattgatggtcccaccgacgagcgggtgtcggaatcggaggccatgaacggcggcgccaccaccgccaccttccgatccatcctcgacaagcccctcaaccagcttaccgaggatgacatttctcagctcactcgcgaagactgtcgcagattcctcaaagaaaaagggatgcgtaggccttcctggaacaaatcgcaggcgatccaacaggtcatttccctgaaagcgctgctggaaccttccgacgatgatactcctcctcctcctcctcccgccatgcaccaccgtagccatgctcaacctcaacctcaagtgaatttgagtgaacctcctcctcctccgcccaaggctccgccacctgaagaacccgcttttcatgctgctgaagacattcagaaatctgcgtcgtctggggaaaagcctacggaaactaatgacaccaacaccaacgttgctagccccaaagggtgtgcaactagtggatcatttgggcaaatgacaattttctattgtggtaaggtgaatgtctatgacagagtctcgcctgataaggcacgagcaatcatgcagcttgcaacgagtccagtccagcttactcaggatgatcctttaaatggaaatgcagctgtttggacttctccttgccacttaccgatggataaggatgtcctcgttcctgttgatactacaatccttcaggttgctcaagcagataagatggtggagtatcctctgcaatatagggagaaagggagcatagctcgtgatgctgatgtagagggtcaggaacaccgaaaagtgtcattgcaacgatatcttgaaaagcgtaaggacaggggaagattgaaaggcaagaaattgactgggataacttcatctaacttcgagatgtatttgaaccttccagtgaaggtccattcctcaaatgggaattcaagccgtagcagtactagctctccaccacaacctagactgcctctagtttccagtggttcagatcagctaaaggttgcccttcccattgatctcaatgacaaagtgtctttgcagatgttcaagaatgctaaaattcaaactagatagattatgcagagttgggactcgtagatgattgaagagagatgacgaaagtattataactgaagagaccatagcgtctagcagcctactgcaagaattggattgctcttagactggtcaattttagtatatttaactgtttgggcaaatttcttttgtttaggatagtggagtgtcctgcctacctgatcaattttgtaatctaatttcatccttcgggaatatcttgttactgaagttttaaggttttatgagttgaaatgtagagccaggagcagctattttcccaggaatatatgatatgtaaattcatcgtgctgcctcttgttaaatgttaatagcttttgtgcaagccaaactattctcttactcttctta

SEQ ID NO: 117 - DNA, 1656 bp, Glycine max
agaatttatttgtatttggagagaagaagaaataaagcttatagttatagtgagaagagaaggaagattagttgctaataattaagacagaaacatacgtggcagcttagggttcaccccaagtcctaaaaacgccccctccctacccttcccccatttcccccccaacccaaacgctgccaacaacaacactctctctacaaaattgatggtcccaccgacgagcgggtgtcggaatcggaggccatgaacggcggcgccaccaccgccaccttccgatccatcctcgacaagcccctcaaccagcttaccgaggatgacatttctcagctcactcgcgaagactgtcgcagattcctcaaagaaaaagggatgcgtaggccttcctggaacaaatcgcaggcgatccaacaggtcatttccctgaaagcgctgctggaaccttccgacgatgatactcctcctcctcctcctcccgccatgcaccaccgtagccatgctcaacctcaacctcaagtgaatttgagtgaacctcctcctcctccgcccaaggctccgccacctgaagaacccgcttttcatgctgctgaagacattcagaaatctgcgtcgtctggggaaaagcctacggaaactaatgacaccaacaccaacgttgctagccccaaagggtgtgcaactagtggatcatttgggcaaatgacaattttctattgtggtaaggtgaatgtctatgacagagtctcgcctgataaggcacgagcaatcatgcagcttgcaacgagtccagtccagcttactcaggatgatcctttaaatggaaatgcagctgtttggacttctccttgccacttaccgatggataaggatgtcctcgttcctgttgatactacaatccttcaggttgctcaagcagataagatggtggagtatcctctgcaatatagggagaaagggagcatagctcgtgatgctgagggtcaggaacaccgaaaagtgtcattgcaacgatatcttgaaaagcgtaaggacaggggaagattgaaaggcaagaaattgactgggataacttcatctaacttcgagatgtatttgaaccttccagtgaaggtccattcctcaaatgggaattcaagccgtagcagtactagctctccaccacaacctagactgcctctagtttccagtggttcagatcagctaaaggttgcccttcccattgatctcaatgacaaagtgtctttgcagatgttcaagaatgctaaaattcaaactagatagattatgcagagttgggactcgtagatgattgaagagagatgacgaaagtattataactgaagagaccatagcgtctagcagcctactgcaagaattggattgctcttagactggtcaattttagtatatttaactgtttgggcaaatttcttttgtttaggatagtggagtgtcctgcctacctgatcaattttgtaatctaatttcatccttcgggaatatcttgttactgaagttttaaggttttatgagttgaaatgtagagccaggagcagctattttcccaggaatatatgatatgtaaattcatcgtgctgcctcttgttaaatgttaatagcttttgtgcaagccaaactattctcttactcttctta

SEQ ID NO: 118 - DNA, 1651 bp, Glycine max
agaatttatttgtatttggagagaagaagaaataaagcttatagttatagtgagaagagaaggaagattagttgctaataattaagacagaaacatacgtggcagcttagggttcaccccaagtcctaaaaacgccccctccctacccttcccccatttcccccccaacccaaacgctgccaacaacaacactctctctacaaaattgatggtcccaccgacgagcgggtgtcggaatcggaggccatgaacggcggcgccaccaccgccaccttccgatccatcctcgacaagcccctcaaccagcttaccgaggatgacatttctcagctcactcgcgaagactgtcgcagattcctcaaagaaaaagggatgcgtaggccttcctggaacaaatcgcaggcgatccaacaggtcatttccctgaaagcgctgctggaaccttccgacgatgatactcctcctcctcctcctcccgccatgcaccaccgtagccatgctcaacctcaacctcaagtgaatttgagtgaacctcctcctcctccgcccaaggctccgccacctgaagaacccgcttttcatgctgctgaagacattcagaaatctgcgtcgtctggggaaaagcctacggaaactaatgacaccaacaccaacgttgctagccccaaagggtgtgcaactagtggatcatttgggcaaatgacaattttctattgtggtaaggtgaatgtctatgacagagtctcgcctgataaggcacgagcaatcatgcagcttgcaacgagtccagtccagcttactcaggatgatcctttaaatggaaatgcagctgtttggacttctccttgccacttaccgatggataaggatgtcctcgttcctgttgatactacaatccttcaggttgctcaagcagataagatggtggagtatcctctgcaatatagggagaaagggagcatagctcgtgatgctgatgtagagggtcaggaacaccgaaaagtgtcattgcaacgatatcttgaaaagcgtaaggacaggggaagattgaaaggcaagaaattgactgggataacttcatctaacttcgagatgtatttgaaccttccagtgaaggtccattcctcaaatgggaattcaagccgtagcagtactagctctccaccacaacctagactgcctctagtttccagtggttcagatcagctaaaggttgcccttcccattgatctcaatgacaaagatgttcaagaatgctaaaattcaaactagatagattatgcagagttgggactcgtagatgattgaagagagatgacgaaagtattataactgaagagaccatagcgtctagcagcctactgcaagaattggattgctcttagactggtcaattttagtatatttaactgtttgggcaaatttcttttgtttaggatagtggagtgtcctgcctacctgatcaattttgtaatctaatttcatccttcgggaatatcttgttactgaagttttaaggttttatgagttgaaatgtagagccaggagcagctattttcccaggaatatatgatatgtaaattcatcgtgctgcctcttgttaaatgttaatagcttttgtgcaagccaaactattctcttactcttctta

SEQ ID NO: 119 - DNA, 1008 bp, Glycine max
atgaacggcggcgccaccaccgccaccttccgatccatcctcgacaagcccctcaaccagcttaccgaggatgacatttctcagctcactcgcgaagactgtcgcagattcctcaaagaaaaagggatgcgtaggccttcctggaacaaatcgcaggcgatccaacaggtcatttccctgaaagcgctgctggaaccttccgacgatgatactcctcctcctcctcctcccgccatgcaccaccgtagccatgctcaacctcaacctcaagtgaatttgagtgaacctcctcctcctccgcccaaggctccgccacctgaagaacccgcttttcatgctgctgaagacattcagaaatctgcgtcgtctggggaaaagcctacggaaactaatgacaccaacaccaacgttgctagccccaaagggtgtgcaactagtggatcatttgggcaaatgacaattttctattgtggtaaggtgaatgtctatgacagagtctcgcctgataaggcacgagcaatcatgcagcttgcaacgagtccagtccagcttactcaggatgatcctttaaatggaaatgcagctgtttggacttctccttgccacttaccgatggataaggatgtcctcgttcctgttgatactacaatccttcaggttgctcaagcagataagatggtggagtatcctctgcaatatagggagaaagggagcatagctcgtgatgctgagggtcaggaacaccgaaaagtgtcattgcaacgatatcttgaaaagcgtaaggacaggggaagattgaaaggcaagaaattgactgggataacttcatctaacttcgagatgtatttgaaccttccagtgaaggtccattcctcaaatgggaattcaagccgtagcagtactagctctccaccacaacctagactgcctctagtttccagtggttcagatcagctaaaggttgcccttcccattgatctcaatgacaaagatgttcaagaatgctaa

SEQ ID NO: 120 - DNA, 1566 bp, Glycine max
ggcagcttagggttcaccccaagtcctaaaaaagccctcccagccttcccccatttccccccaacccaaacgctgaacaacaaccacactctctacaaaattgatggtcccaccgacgagcgggtgccggaatcggaggccatgaacggcggtgccaccaccgccaccttccgatccatcctcgacaagcccctcaaccagctcaccgaggatgacatttctcagctcactcgcgaagactgtcgcagattcctcaaagaaaaagggatgcgcaggccttcctggaacaaatcgcaggcgatccaacaggtcatttccctgaaagcgctgctggaaccttccgacgatgatactcctcctcctaccgccatgcaccaccgtagtcatgctcctccccctccacctcaacctcaatctcaagtgaatttgactgaacctcctcctccgcccaaggctccgccacctgaagaatcctcttttcatgctgctgaagacattcagaaacctgcgtcgtctggggaaaaaccttcggaaactaatgacaccaacaccaacgttgctagccccaaagggtgtgcaactagtggatcatttgggcaaatgacaattttctattgtggtaaggtgaatgtctatgatggagtctcgcctgataaggcacgagcaatcatgcagcttgcggtgagtcctgtccagtttactcaagatgatccttcaaatggaaatgcagctgtttggccttctccttgccacttaccaatggataaggatgtcctcattcctgtagatacaacaatccttcaggttgctcaatcagataagatgatggaatatcctctgcaatatagagagaaaggtagcatagctcgtgatgctgatgtagagggtcaggcaagcagaaaagtgtcattgcagcgatatcttgaaaagcgtaaggacagggggagattgaaaggcaagaaattgactgggataacttcatctaacttcgagatgtatttgaaccttccagtgaaggtccatgcctcaaatgggaattcaagccgtagcagtactagctctccaccacagcctagactgcctctagtatctagtggttcagctgacaaccagctaaaggttgcccttcccattgatctcaatgacaaagtgtcattgcagatgttcaagaatgctaaaactctaactagatagattatgcagagttgggactcgtatatgaatgattgaagagagatgatgaaagtattataactgaagagaccatagcgtctagcagcctactgcaacaattggactgctcttagactggtcgattttagtatcttttaactgtttgggcaaatttcttttgtttaggatagtggagtgtcctgcttacctgatcaattttgtaatctaatttcatccttcgggaatttcctgttactgaagttttaaggttttatgagttgaaatgtagagccaggagcagccattttccgaggaatatatgatatgtaaattcatggcgctgcctcttgttaaatgttaatagcttttgtgcaaagccaaaccactctctta

SEQ ID NO: 121 - DNA, 1553 bp, Glycine max
cagcttagggttcaccccaagtcctaaaaaagccctcccagccttcccccatttccccccaacccaaacgctgaacaacaaccacactctctacaaaattgatggtcccaccgacgagcgggtgccggaatcggaggccatgaacggcggtgccaccaccgccaccttccgatccatcctcgacaagcccctcaaccagctcaccgaggatgacatttctcagctcactcgcgaagactgtcgcagattcctcaaagaaaaagggatgcgcaggccttcctggaacaaatcgcaggcgatccaacaggtcatttccctgaaagcgctgctggaaccttccgacgatgatactcctcctcctaccgccatgcaccaccgtagtcatgctcctccccctccacctcaacctcaatctcaagtgaatttgactgaacctcctcctccgcccaaggctccgccacctgaagaatcctcttttcatgctgctgaagacattcagaaacctgcgtcgtctggggaaaaaccttcggaaactaatgacaccaacaccaacgttgctagccccaaagggtgtgcaactagtggatcatttgggcaaatgacaattttctattgtggtaaggtgaatgtctatgatggagtctcgcctgataaggcacgagcaatcatgcagcttgcggtgagtcctgtccagtttactcaagatgatccttcaaatggaaatgcagctgtttggccttctccttgccacttaccaatggataaggatgtcctcattcctgtagatacaacaatccttcaggttgctcaatcagataagatgatggaatatcctctgcaatatagagagaaaggtagcatagctcgtgatgctgatgtagagggtcaggcaagcagaaaagtgtcattgcagcgatatcttgaaaagcgtaaggacagggggagattgaaaggcaagaaattgactgggataacttcatctaacttcgagatgtatttgaaccttccagtgaaggtccatgcctcaaatgggaattcaagccgtagcagtactagctctccaccacagcctagactgcctctagtatctagtggttcagctgacaaccagctaaaggttgcccttcccattgatctcaatgacaaagatgttcaagaatgctaaaactctaactagatagattatgcagagttgggactcgtatatgaatgattgaagagagatgatgaaagtattataactgaagagaccatagcgtctagcagcctactgcaacaattggactgctcttagactggtcgattttagtatcttttaactgtttgggcaaatttcttttgtttaggatagtggagtgtcctgcttacctgatcaattttgtaatctaatttcatccttcgggaatttcctgttactgaagttttaaggttttatgagttgaaatgtagagccaggagcagccattttccgaggaatatatgatatgtaaattcatggcgctgcctcttgttaaatgttaatagcttttgtgcaaagccaaaccactctctta

SEQ ID NO: 122 - DNA, 1020 bp, Glycine max
atgaacggcggtgccaccaccgccaccttccgatccatcctcgacaagcccctcaaccagctcaccgaggatgacatttctcagctcactcgcgaagactgtcgcagattcctcaaagaaaaagggatgcgcaggccttcctggaacaaatcgcaggcgatccaacaggtcatttccctgaaagcgctgctggaaccttccgacgatgatactcctcctcctaccgccatgcaccaccgtagtcatgctcctccccctccacctcaacctcaatctcaagtgaatttgactgaacctcctcctccgcccaaggctccgccacctgaagaatcctcttttcatgctgctgaagacattcagaaacctgcgtcgtctggggaaaaaccttcggaaactaatgacaccaacaccaacgttgctagccccaaagggtgtgcaactagtggatcatttgggcaaatgacaattttctattgtggtaaggtgaatgtctatgatggagtctcgcctgataaggcacgagcaatcatgcagcttgcggtgagtcctgtccagtttactcaagatgatccttcaaatggaaatgcagctgtttggccttctccttgccacttaccaatggataaggatgtcctcattcctgtagatacaacaatccttcaggttgctcaatcagataagatgatggaatatcctctgcaatatagagagaaaggtagcatagctcgtgatgctgagggtcaggcaagcagaaaagtgtcattgcagcgatatcttgaaaagcgtaaggacagggggagattgaaaggcaagaaattgactgggataacttcatctaacttcgagatgtatttgaaccttccagtgaaggtccatgcctcaaatgggaattcaagccgtagcagtactagctctccaccacagcctagactgcctctagtatctagtggttcagctgacaaccagctaaaggttgcccttcccattgatctcaatgacaaagatgttcaagaatgctaa

SEQ ID NO: 123 - DNA, 1561 bp, Glycine max
tggcagcttagggttcaccccaagtcctaaaaaagccctcccagccttcccccatttccccccaacccaaacgctgaacaacaaccacactctctacaaaattgatggtcccaccgacgagcgggtgccggaatcggaggccatgaacggcggtgccaccaccgccaccttccgatccatcctcgacaagcccctcaaccagctcaccgaggatgacatttctcagctcactcgcgaagactgtcgcagattcctcaaagaaaaagggatgcgcaggccttcctggaacaaatcgcaggcgatccaacaggtcatttccctgaaagcgctgctggaaccttccgacgatgatactcctcctcctaccgccatgcaccaccgtagtcatgctcctccccctccacctcaacctcaatctcaagtgaatttgactgaacctcctcctccgcccaaggctccgccacctgaagaatcctcttttcatgctgctgaagacattcagaaacctgcgtcgtctggggaaaaaccttcggaaactaatgacaccaacaccaacgttgctagccccaaagggtgtgcaactagtggatcatttgggcaaatgacaattttctattgtggtaaggtgaatgtctatgatggagtctcgcctgataaggcacgagcaatcatgcagcttgcggtgagtcctgtccagtttactcaagatgatccttcaaatggaaatgcagctgtttggccttctccttgccacttaccaatggataaggatgtcctcattcctgtagatacaacaatccttcaggttgctcaatcagataagatgatggaatatcctctgcaatatagagagaaaggtagcatagctcgtgatgctgagggtcaggcaagcagaaaagtgtcattgcagcgatatcttgaaaagcgtaaggacagggggagattgaaaggcaagaaattgactgggataacttcatctaacttcgagatgtatttgaaccttccagtgaaggtccatgcctcaaatgggaattcaagccgtagcagtactagctctccaccacagcctagactgcctctagtatctagtggttcagctgacaaccagctaaaggttgcccttcccattgatctcaatgacaaagtgtcattgcagatgttcaagaatgctaaaactctaactagatagattatgcagagttgggactcgtatatgaatgattgaagagagatgatgaaagtattataactgaagagaccatagcgtctagcagcctactgcaacaattggactgctcttagactggtcgattttagtatcttttaactgtttgggcaaatttcttttgtttaggatagtggagtgtcctgcttacctgatcaattttgtaatctaatttcatccttcgggaatttcctgttactgaagttttaaggttttatgagttgaaatgtagagccaggagcagccattttccgaggaatatatgatatgtaaattcatggcgctgcctcttgttaaatgttaatagcttttgtgcaaagccaaaccactctctta

SEQ ID NO: 124 - DNA, 2884 bp, Glycine max
tttgcacacctttgttgaagggagagaaggatacaatacaatatgattccatttggcaattgggccattggcgattagcattgacatgatcaaccacaatgcatacattaattatatatactgtttagcgattgctttcattcacctatttctttgtcttcttcctagctagtccttccttcgtcaacacccctttttgctgatggcgcaaattctgctccatgggactcttcatgccactatctatgaagtcgataagctcaaaattggtggaggcaactttttaaccaagatcgtacaaaacatcgaggagactgttggtattggaaaaggtgtcactaaactatatgcaaccattgatctagagaaggcacgagtggggaggaccagaattattgaaaaagagattaaaaatccaagatggtacgagtcctttcatatttattgtgcccatatggcatcaaacatcatatttacagtgaaagatgataatcctattggggcaaccttaattggaagagcatatgtgcctgttcaggagatcttgcatggtgaagaaatagatagatgggttgaaatattggatgagcataaaaatccaatacatggacattccaagatccatgtgaagttgcaatattttgatgtttcaaaagaccgcaactgggctctaggcattagaagtccaaaatttcctggagttccttatactttcttttcacaaagaagaggatgtaaggtttctctctaccaagatgctcatgtacctgacaattttgtccctaaaatacaacttagtgggggccagacttaccaagctcatagatgttgggaggatgtttttgatgcaatcactaaagcacaacacttaatatacattactggttggtctgtctatactgagattagtttggtaagggattctaggaggccaaagcctggaggagatgaaacacttggtgagcttctcaagaaaaaagcaagagaaggtgtaagggttttaatgcttgtttgggatgatagaacttcggttcctttgttaaaaaaagatgggttaatggccactcatgatcaagaaacagaggagtatttccggggcactgaagtgcattgtgttttatgccctcgcaatcctgatgatggtggaagctttgttcaggatttagaaatttccaccatgtttactcatcaccagaaaattgtagtcgtggatggtgaattgccgagtggagattctaataagagaagaattgtgagttttgtggggggtattgatctctgtgatggaagatatgacactcaattccattcacttttcagaaccctggacacagcacatcatgatgactttcatcagcctaactttggtggttcttcaataaaaaaaggtggtccaagggaaccttggcacgacatccattctcgacttgaaggccctattgcttgggatgttttgttcaactttgagcagagatggaggaagcagggaggaaaggacttacttgttccactgagagaccttgaagatgtcattattcccccatccccggtaacttacattgatgatcatgagacatggaatgttcaattatttagatccattgatggtggagctgcttttgggttcccagagactcctgaagatgctgccagagtggggcttgtcagtgggaaggataatataatagatcgtagtattcaagatgcttatgttaatgccattcgacgtgcgaaaaatttcatctatattgagaatcagtatttccttggaagcagttatgattggagtgctgatggcattaagcctgaagccatcgatgctttgcatattatcccgaaggagctttcacttaagattgttagtaagattgaagctggggaaaggttcagtgtgtatgttgtggttccaatgtggccagagggtgtcccagaaagtgcatcagttcaggcaatattggattggcagaggagaacaatggatatgatgtacaaggatgttgttcaggcgctccgggccaagggaatagtggaaaatcctcgtaactatttgacattcttctgccttggtaatagggaggtgaagaaacaaggagagtacgagcctccagaaagaccagatcctgatacagattatatcagagctcaggaggcccggcgcttcatgatttatgttcatgccaagatgatgatagttgatgatgaatacataatcgttggatctgccaacataaaccagagatcaatggatggtgccagagattctgagattgccatgggtgcttatcaaccatttcatttggctgccaggcagcctgccaggggacagatccatggtttccgcatgtcgttgtggtatgagcaccttggcttgcttcatgactctttcctccaccctgaaaatgaagaatgtattaagaaggtgaaccaaattgctgacaagtattgggatatctattcaagtgagtcacttgagcatgaccttcctggtcacctgctccgatatcctattggggtttccaacgaaggagttgtcactgagcttccaggatttgaattcttccctgacaccaaggctcgtgttcttggcgacaaagttgattaccttccaccgatccttactacttaagtttcattttataagcttgttaataaaatatagtacttatgttgttagagtgagcaacaattgtaatggttctgtagagatggtttcattctgaagattgccttccagattttaacaatctgatgatgagaaggcaatcagcttgtatgactctatctgcattatgatacatgtttatcgggtttcttaactacgtttaaacattgtagctatatattgtgagtttttctgtggaaaattattgttcttttctctcca

SEQ ID NO: 125 - DNA, 2136 bp, Glycine max
atgacacaaattctactgcatgggaccctccaagtcacaatctatgagctggataacctcaaggctggaagtggtggtaatattttaaccaagttggtacataacatcgaagagactattggtattgggaaaggaattactaaactatatgcaaccattgatctagagaaggcacgggtgggaagaaccagaatcatagaaaaggagcacacaaatcctaaatggtacgagtctttccacatttattgtgctcatatggcatcaagtattatattcacagtgaaagatgacaatcctattggtgcaaccttaattggaagagcatatagacaagggtgtaaggtttctctgtaccaagatgctcatgtcccagacaactttgtccctaaaataccacttgctggaggccacacttaccaacctcatagatgttgggaagatgtttttgatgcaatcaataacgcacaacacttgatatacattacaggatggtctgtttacactgagattacgttggtaagagattctaggaggccaaagcgtaggagatgcaacacttgggttttgatgcttgtttgggatgatagaacttcggttcctttgttaaaagaagatggcttgatggcaactcatgatgaagacaccgagaactacttctacgacagtgaagtgcactgtgttttatgccctcgaaatcctgacgatggaggaagcgttgttcaggacgtagaaattttctccatgtttagtcatcatcagaaaattgtggtagtggacagtgctttgccgaatggaagatcagataaaagaagaattgtgagttttgttgggggtattgatttttgtgatggaagatatgacactcaatttcactcactttttagaaccttgggcactgtacatcatgatgattttcatcagcctaacttttcacatacttcaataaagaaaggtggtccaagggaaccatggcatgacattcactctcggcttgaagggcctattgcatgggatgttttgttcaactttgagcaaagatggaagaagcaaggtggaaaggacttacttattccacctaaagatcttgaaaatgtcattattcccccatcagtagtaacttaccctgaagaccatgaggcatggaacgttcagttatttagatccattgatggtggagctgcttttgggttcccagagactcctgaggaagcagctagatctggactcattagtgggaaggataatataatagaccgtggcattcaagatgcttatattaaagccattcgacgtgccaaaaatttcatctatattgagaatcagtactttcttggaagttgttatgcttggagtgctgatgggattaagcctgaagacattggtgctttgcatctgataccgagggagctttcacttaagattgttagcaagattgaagcttgggaaaggttcagtgtttatattgtggttccaatgtggccagagggttacccagaaaaaggaacggttcaagcaatattggattggcagaggagaacaatggatatgatgtacaaggatgttgttggagcactaaaaggcaagggtaatgaggaagatcctctcaactatttgacattcttctgcctcgttaatagggagctgaagaaagaaggagagtatgtgcccccagaaagaccagatcctcatacagattatatgagagcacaagtgtcccgacgcttcatgatttatgttcatgccaagatgatgatagttgatgatgaatacataatcattggatctgccaacataaaccagagatcaatggatggtgcgagagactctgaggtggcgatggctgcttatcaaccctatcatttggctaccaagcagccagcaaggggacaaatccacggtttccgcatgtcattgtggtatgagcaccttggcttgcttcatgactccttcctccatcctgagagtgaagaatgtattgagaagcaagaccttcctggccatctgcttcgctaccctgttgcgatttccagccaaggaaatgtgacacaactgcaagcatttgaattcttccctgacacaaaagctcctattcttggggctaaatctgactacattccacctatccttactacttaa

SEQ ID NO: 126 - DNA, 2787 bp, Glycine max
gttataaggagagagactcactcactcactcacctccatttccattgtcactgctccttattcggatctatctcacaccctttctctcttttcttcttttctttcgttttcccttcgcaagtgagagatggcgcaaattctgcttcatgggactctccacgccaccgtcttcgaggttgataggctcaatgctggtggtggtggcggcaattttttcagcaagctcaagcaaaactttgaggagactgttggcatcggaaagggagttactaaactctatgcaaccattgatctggagaaagcaagagtaggaaggactagaatcatagaaaatgaacatactaatcccagatggtatgagtcttttcacatttattgtgctcatatggcttcaaatatcatattcactgtgaaagatgataatcctattggggcaactttaattggaagagcttatgtgcctgtttcggaggtcttggatggtgaggaaatagataggtgggttgaaatcttggacgaggaaaaaaacccaatacaagagggttcaaagatccatgtgaagctgcaatattttgatgtcacaaaagaccgcaactgggctcgaggcattagaagtcccaaattccccggcgttccctatactttcttctcacagaggcaaggatgtaaggtatctctgtaccaagatgctcatgtacctgataattttgtacctaaaatacctcttgctggaggcaagaattatgaggctcataggtgttgggaggatatatttgatgcaatcactaatgctagacacttcatatacattactggttggtctgtttatactgaaatttccttggtgagggattctaggaggccaaagcctgggggagaccaaacacttggtgagcttctcaagaaaaaggcaaatgaaggggttaaggtattgatgcttgtttgggatgatagaacatcagttggtttgttgaaaaaagatggactaatggctactcacgatgaagaaactgcacagttctttgaaggcactgaggtgcattgtgttttatgcccccgcaatcctgatgatggtggtagcattgttcaggatttacaaatttctaccatgtttactcatcaccagaagatcgtggtggttgacggtgcgatgccaggtgaagggtcagataggcgaagaattgtgagttttgttgggggtattgacctctgcgacggaagatatgacactgccttccactcacttttcagaaccctagacacagcacaccatgacgattttcatcagcctaactttcctggtgctgctatcacaaaaggtggtcccagggaaccatggcacgacatccactcccggcttgaaggacccatagcttgggatgttttgttcaactttgagcagagatggagaaagcaaggtgggaaggatgtacttgttccactgagagagcttgaagatgtcattattcccccatccccagtaacgtttcctgaagatcatgagacctggaatgttcagttgtttagatccattgatggtggggctgcttttgggttcccggagactcctgaagatgctgccagagctggtcttattagtgggaaggataatatcattgatcgtagcattcaagatgcttatattaatgctattcgacgtgcaaagaacttcatctatattgaaaatcagtatttccttggaagctcttttgcctggagtgctgatgatattaagcctgaagacattggtgctttgcatctaatcccaaaggaactttcactcaagattgttagtaagattgaagctggggaaaggtttgctgtgtatgttgtagtcccaatgtggccagagggtgttccagaaagtgcatcagttcaggcaatattggactggcagaagagaacaatggagatgatgtacaaggacattattcaggcactcagagctaagggaatcgatgaagatcctcgaaactatttgacattcttctgccttggcaaccgggaagtgaagaaaccaggagaatatgagccttctgagcaaccagatcctgattcagattatcagagagcccaagaggcccgacgattcatgatttatgttcataccaagatgatgatagttgatgacgaatacataatcgttggatctgccaatatcaaccaaaggtcaatggatggtgctagggactctgagattgccatgggtgcttatcagccctatcatttggctaccaggcagccagcacgtggtcagattcacggtttccgcatgtcattgtggtatgagcaccttggcatgcttcatgactccttcctccagccagaaagtgatgaatgcattaacaaggtgaaccaagttgctgacaaatattgggatctgtattctaacgagtcacttgagcatgaccttcccggtcaccttctccgctaccccatcggggttgccagtgaaggagatgtcaccgagctgccaggatttgaattctttcccgacaccaaggctcgcattcttggtggcaaagctgactacctcccccctattctcactacttaatttgattttgtactttgttacaaacttgttattgcttacatcctaatctgtgttttcattactacttagtaataatcttaatatagtctgtgatgtcttgtggagatgttttttctgctatttttctgaagatttcagtgacagattttagttatctgatgttgttggtgggtatggctttgactggtttctaatcaatgtttccttttctcccaaaaaaaaaaaaaaaa

SEQ ID NO: 127 - DNA, 2714 bp, Glycine max
ccgttttgatccaacccgcgatctgatcttactccttcatctctcaaagtttgtatctttgtgtgccatacgcgtgagagatggcgcaaattctgcttcatgggactctccatgccaccatcttcgaggttgataggctcaatgctggtggtggtggcggcaattttttcagcaagctcaagcaaaactttgaggagactgttggtattggaaagggagttactaaactctatgcaaccattgatctggagaaagcaagagtaggaaggactagaatcatagaaaatgaacatactaatcccagatggtatgagtcttttcacatttactgtgcccatatggcttcaaatattgtattcactgtgaaagatgataatcctattggggcaactttaattggaagagcttatgtgcctgtttcggaggtcttggatggtgaggaaatagacaggtgggttgaaatattggatgaggaaaaaaacccaatacatgagggttcaaagatccatgtgaagctgcaatattttgatgtcacaaaagaccgcaactgggctcgaggcattagaagtcctaaatttcctggagttccctatactttcttctcacagaggcaaggatgtaaggtatctctgtaccaagatgctcatgtgcctgataattttgtacctaaaatacctcttgctggaggcaagaattatgaggctcataggtgttgggaggatatatttgatgcaatcactgatgctaaacacttcatatacattactggttggtctgtttatactgaaatttccttggtaagggattctaggaggcctaagcctgggggagaccaaacacttggtgagcttctcaagaaaaaggcaagtgaaggtgttaaggtattgatgcttgtttgggatgatagaacatcagttggtttgttgaaaaaagatggactgatggctactcacgatgaagaaactgcacagttctttgatggcactgaggtgcattgtgttttatgcccccgcaatcctgatgatggtggtagcattgttcaggatttacaaatttctaccatgtttactcatcaccagaagattgtggtggttgacggtgcgatgccaggtggagggtcagataggcgaagaattgtgagttttgttgggggtattgacctctgtgatggaagatacgacactgccttccactcactgttcagaaccctggacacagcacaccatgatgattttcatcagcctaactttcctggtgctgtaatcacaaaaggtggtcccagggaaccttggcatgacattcactcccggcttgaaggacccatagcttgggatgttttgttcaactttgagcaaagatggagaaagcaaggtgggaaggatgtacttgttccattgagagagcttgaagatgtcattatctccccatccccagtaacatttcttgaagatcatgagacatggaatgttcagttgtttagatctattgatggtggggctgcttttgggttcccagagactcctgaagatgctgccagagctggtcttattagtgggaaggataatatcattgatcgtagtattcaagatgcttatattaatgctattcgacgtgcaaagaacttcatctatattgaaaatcagtatttccttggaagctcttttgcctggagtgctgatgatattaagcctgcagacattggtgctttgcatctaatcccaaaggaactttcactcaagattgttagcaagattgaagctggggaaaggtttgctgtgtatgttgtagtcccaatgtggccagagggtgtcccagaaagtgcatcagttcaggcaatattggactggcagaagagaacaatggagatgatgtacagggacattattcaggcactcagagctaagggaatcgaggaagatcctcgaaactatctgacattcttctgccttggcaaccgggaagtgaagaaaccaggagaatatgagccttctgaacaaccagatcccgattcagattatcagagagcccaagaggcccgacgattcatgatttatgttcataccaagatgatgatagttgatgacgaatacataatcgttggatctgccaacatcaaccaaaggtcaatggatggtgctagggactctgagattgccatgggtgcttatcagccctatcatttggctaccaggcagccggcacgtggccagatccatggtttccgcatgtcattgtggtatgagcaccttggcatgcttcatgactccttcctccagccagaaagtgaagaatgcattaataaggtgaaccaagttgctgacaaatattgggatctgtattctagtgagtcacttgagcatgaccttcctggtcaccttctccgctaccccatcgggattgccagtgaaggagatgtcactgagctgccaggatttgaattcttccccgacaccaaggctcgcattcttggtggcaaagctgactacctcccccctatcctcactacttagtttgattttgtactttgttacaaacttgtgattgcttacatcctaatttgtgtttttattactacttagtaataatcttaatatagtctgtgatgtcttgtggagatttttttttcttctatttttttgaagatgtcagtgacagattttagttatctgatggctttgactggtttctaatcaatgtttccttttctctcacaa

SEQ ID NO: 128 - DNA, 2816 bp, Glycine max
tatcctccttttcagttcccatcatctccacttctctgcatataaatgcatcacattaaggcgtaagagcccttcatcataaggacggtaccatcgtcaacattttccaatccttaacctccatttccacgaagggagatcaaacataatagtataacataatgccgcatttgctgcacgggaggctcgatgtgatcatatacgaggtcgacacactaccaactctcaacgactgcaatcttaacctctgcagcaagggtacaagtagaagcgtggggaagagatttctttcccaactcaagagttgttttctctgtcaatgccaatgccagccagagtttgtggagacgggtctctatgcaacaattgatttagataaggcaagggttggaaggactaaattgttaaatgatcaatcctccaaccccacgtgggacgagacctttcacgtatactgtgcccatttgatctcccatgttatattcactgtcaaacaaaaagatccaattgatgcaactctaattggaagagcttatgtcccagttgagcaagttgtgaatggcaacatagtggacgaatgggtccaaattttagacgaggatcataaccctataccaagtgagtctaaaatccatgttaaaatgcaattctctagtgttaggaatgacataaactggtctcaaggaataaggagtccaaggtttcaaggagttcctcacaccttctttagtcaaaaaaatggttgcaaagttactttgtaccaagatgctcatgtctcagatggttttgtgccatggatccccttgtcaggaggaaaaccttatgagcataggaaatgttgggaagatatttataatgccattatggatgctaggaactttatttatataactggttggtctgtgtacagtgaaataaccttgattagggacccaatgaagcctacaacaagaatcacccttggggaactgctcaagatgaaagctgaggaaggtgtcaaggttcttatgcttgtttgggatgacagaacctctgtgccagatttcaagaaagatggcttgatggcaactcatgatcaagaaactgctgattacttcaaaaacacaaaggtgaaatgtgttttgtgtccacggaacccagatgatgggaaaagcatagtgcaaggttttgaaacttcaacaatgttcactcatcaccaaaagactatagttgttgacacccaagttgctatgggacaacaaggacaaaagagaacaatagtaagctttgtaggtggcattgatctttgtgatgggagatatgatactcaggaacatcctctattttcaactttggacacagtgcataaagatgatttccatcagccaaatttccctggtgcttccatcaagaaaggtggtccaagagagccatggcatgacattcattgcaagttagaagggtctgttgcttgggatgttttgtacaattttcaacaaaggtgggagaagcaggttggaaatcagctcctattctcttcaagcaagcttgatgagtactttgtccctcgatccacggtggtgacaacaaatgaaaatgagacatggaatgttcagttgttcagatccattgatggtggtgctgcttctggctttccccctgacccagaagaagcggctgagttaggccttgttagtggaaaagataacatcattgatagaagcattcaagatgcttatataagcgctattcggcgagccaaaaactttatctacattgaaaaccagtatttcctagggagttcatatggttggcaagcatctgatattgtggttgaggatattggtgctttgcatcttataccaaaggagctgtcattgaagattgttagcaagattgaagcaggggagaggttttcagtgtatgttgttataccaatgtggccagaaggcatacctgagagtggttcagttcaggcaatattagactggcaaaggagaacaatggagatgatgtatgctgatatagccaaagccattcagagaaaaagaattcaagccaatccaagggactacttgacctttttctgccttggaaaccgtgagggtaagaaggatatggaatatactcctactgaggcaccagagcctgatactgattatgctagagcacaaaaggctaggcgattcatgatctatgttcatgccaagatgatgatagttgatgatgaatacattataattggatctgccaacataaaccagagatcaatggatggagaaagagacactgagattgcaatgggtgcattccaaccacgtcatatagcatataatggggcacccagaggacaaatatatggatttaggcgtgcactatggtgtgagcaccttggggatcatggggatacaaacatcttcgacaatccagaaagtgtggactgcatcaggcttgtgaatcatcttgctgaaaccaattgggacatatactctaaggaaacttttgatgagtatagagaatttcaccacctcatgcgctaccccatagaagtaaccaacaatggagcaataacgatccttcaagggctagaacattttcctgacaccaaggctaagattttgggctcccaatcagtttaccttcgtccaattctcaccacctagattgtattgtacatgtgaaggaaactatcccatcttaccaagagataaaaagtttaaaatgtcaaaccatgtaatttcttgttgcgaagagggtggtgaaaatttgaatgtatattcatacaaataattgctattaccatttgtacaataataaatgtaacgtcttgtttctaa

SEQ ID NO: 129 - DNA, 2810 bp, Glycine max
gtatcattatcaacttaaatgtgaccctttatttttttcatcacatttaagaaacgatccctgctttatttagccattcctcaaaagtttcctacaattttgtgaaaattcgaattttatttcactcaatttgattaccttctgtgattatgatacagatcatagcatagaaacaaaaatgcctcagttgctacacgggacgcttaaggtaaccatatttgaagttgatagactacatactggatgtcatttggatttctgccagaagggcacaacacacaaggggaagagatttctagcccaagtcaagggatgtctgctgtgccggcctgagattgttggaacaagactctatgcaacaattgatttagacaaggcaagggttggacgaaccagaatgataggaaaccaaccttctcaccccaggtggaacgagaccttcgaaatctactgtgcccatcaaatctcaaagatcatattcactgtcaaagatggtaacccaattggagcaactctaattggaagagcctctgtccccgtggagcaagttcgcaagggccccatagttaagcgttgggttgagatattagacgaagaagatcaacgtcctgtacctggtcacgccaaaatctgtgtcagcgtgcaattctacgatgtcaccgatgacacaacatgtctatggtctcagggtataagcatgccattttttggagtacctcgtacttttttcaatcaaagagaaggttgcaatgttactttgtaccaggatgctcatgtcccacgtggcattggtgttgtcccttacattccaatatccgaagaaaaagattacatgccagcaatgtgttgggaggacattaacaaagccattaatgaggctaagtattttatttacataactggttgggctgtttacactgaaatcaccttagttagagacaaagacgaatcagaaacacttggggagttacttaagaggaaagctgatcaaggtgttaaagttcttttgcttatttggaatgacagaacttctgttccagaattgaaagatggcttcatggcaacacatgatcaggaaactgctggttactttagaggcacaaaggtgcaatgtgttttgtgtccacgaaacccggatgatggaagaagcatagttcaaggccttaaaacctcaacaatgttcactcaccaccagaagagtgtagtagttgatggccatgttgtaggatcagagaagagaagtgtcataagtttcataggtggcattgatctttgtgatgggaggtatgatacaagggatcatcctctattttcaactttgaatactatgcatagaaatgatttccatcagccaactttcccaaatgcttccatagataaaggcggtccaagagagccgtggcatgacattcattgcaagctagaagggcctattgcttgggatgtcttgtacaattttgagcaaaggtgggagaagcaagttgggaagaagttgttgtactcacttgatgatcttgatgagattcttgtccacccatctgaagcacaaaaatcagaagtgggagtagaagaaacatggaatgttcagttgtttagatcaattgatggtggtgctgcttctggcttcccccaaaccccgaaagaagtttctgaattaggccttgttagtgggaaagacaatgtcatcgagagaagcattcaggatgcatacattcatgctattcggcgtgcgaaaaacttcatctacattgagaaccagtacttcctagggagttcatatggttggcaagcaagtggtgatattgtggttgaggacattggtgctttgcatcttataccaaaggagatatcattgaagattgcaagcaagattgaagcaaaagagaggttttctgtgtacatagttatccctatgtggccagaaggtgtacctagcagtgattcggttcaggcaatattggattggcagaagagaaccatggagatgatgtattctgacattactgatgccttaaaaaaaactggcattcaagcacgccctcgagattatttgacatttttttgccttggcaagagggagaataaggatccaggagattatactcctctagagaaaccagagcctgatagtgactatggaagagcacaaaattctaggagattcatgatctatgttcattccaaaatgatgatagttgacgacgaatacataatcgttggttcagctaacataaatgaaaggtcaatggagggtgcaagagacacagagattgcaatgggtgcattccaaccacgtcatctagcatcgagtgggcgacccaaaggggagatatatagatttcgacgtgcactatggtatgagcaccttggggatgatggttttgggtcaaaaatattcgattttcccgaacatttggaatgcatcaatcatgtgaataaacttgctgaggccaactgggacatgtactcaatggaaacatttgttgaaaataaaagacaatttcaccacctaatgtgctaccccatacaagtaaccaatgatggagccataacaaatcttccggggtttgaatattttcctgacaccaaggctcggattttgggttgcaaatcaaaacttattccttcaattctcaccacttagccagtattgtgctcatctaagtgactaaacctaagacagaaaatttaaccatgtaatgacttgtagggaggagggtgaagagaaattgaatgtattcacattaactaattagcattacaagttacaacattacatttttaataaaaataaataatttaaacgtcta

SEQ ID NO: 130 - DNA, 4369 bp, Glycine max
gtaggtttaggtaacgtgccatgctagtattccacgtggactttcgttccctgaacggacttcttcttcttccgaaacaaaggtaagaaaagtctcctccttcaactaagtttattcatttgataaaatacccaccaaaattttcaactaagtttattcatttgatcgaattcccaccaaatcagccaaaattttcagtagctatactataggatcattctcaactatcacccttcaatcactgcaattcactttctttctttcaaatatgtcttttgtatcaattcaaatccaattggcacggttcttgtttgattccctccaattttatgtcttcttctatgacccttttgtattgagaatcaagttttgattttagctataatattatttataagaagggtgataatttttgtattgaattgaatggataattatggatcatcttctccttaccggtatccaagcccatatatgtaccctcccaatcctcatcaaccgtaccctcctcctccaggttcagctcctgatccatatgcacagcatgttccttatcaaccatatccttacctttcttcacattccttcaactattcctatcctccacctcctagaccttcctcacattctggccattttgagtattcctatactcctcctcctcacccttctgattttccctacccccctccaccttattatgctcatcctccatcttatccttatccctaccatgttcctccaccaaatcatgatccttccaagccttccctttcataccatgctagtttccaacatggatcatctcattattattatcaacaaccaaaccaggcctattcagcttcggctcctgaagtccaacctgatatccactcgcacaccaatagctactctggtccctactggcaggagaacacaagcactgcagcagatgaagtgtcacaagctagtgatagttccaagccttctcagggttctgcttacccgcctttggatgatcttatgagcaatgttcggttgtctgatggccagccaactgctcctgcatcgccacctgcacctgcaaggcaaccatttatgcattccatttcagttccaaagttgcaacagaagagagaggaattttatggatattcgaataactccttctcggggtggggatcctcctaccacagtcaggtggattcgtctaggctttctgatttttctggctcatttaatgaatcaatgcatagtcagagtttgcagattgttccagtgcagaataaagggtccttgagagttttgctgctacatggaaatttagatatatggatccatgaagccaagaaccttccaaatatggacatgtttcacaaaacattaggagatatgtttggtaaattacctggtagtgtgggcaataaaattgaaggaactatgaataagaagattactagtgatccttatgtatcaatttcagtatccaatgctgttattgggaggacttacgtcattagcaactccgaaaatcctgtttggttgcaacatttctatgttcctgttgcgtatcatgctgctgaagtgcactttcttgttaaagacaacgatattgtgggttcacagctcattggcattgtggcaattccagtggagcaaatatactcaggagcagtagttgaaggaacctttcctatcctgaataataatgggaagccttgtaagcaaggtgctgtcctgaccctatccattcagtacatacctatggagaaattgagcatttatcaccaaggagttggagcagggccagaatacattggggttcctggcacatattttcctttgaggaggggtggaaccgttactctgtaccaagatgctcatgttccagatggcagcctccctaatgtgttgcttgacagtgggatgtattatgtgaatggaaagtgttggcaagatatctttgattccataagtcaagctcggcgtttgatttatattacaggatggtctgtgtggcacaaagtaaggttggttagggatgctgctggttatgcttcagattataccttgggtgatcttgtaaagtcaaagtcacaggaaggagtaagagttcttctccttatctgggatgatcctacgtcaagaagcatttttggttataaaacagatggtgtcatggcaactcatgatgaggaaactcgtagattttttaagcactcttcagtgcaagtgcttctttgtcctcgcagtggcaaacgacatagctggatcaagcaaaaggaagttggaacgatatatacacatcatcagaaaaccgtgattgtggatgctgatgctggaaataatagaagaaaaattatagcatttgttggtggacttgatttgtgtgatgggcgatatgatactccccaccatcctctttttagaacattgaatacaatacataaggatgactaccacaaccctacttttacgggtaatattggtggttgtccgcgggagccatggcatgatttgcattctaaaattgatggtccagcagcttatgatgttttaactaactttgaggagcgctggttaaaagcttcgaaacctcacgggattaaaaagttgaaaatttcatatgatgatgctttgctaaggctggaaagaattccagatgttattggcatcaatgatgctccaagtgttggtgaagataatcctgaagtttggcatgttcagatatttcgttcaattgattcaaattccgttaaggggtttccaaaggatccaaaagatgcaacgagcaagaacctagtttgtggaaagaatgtgctgattgacatgagcatacatacagcatatgttaaggccattcgtgctgcacaacattacatttatatagagaatcaatatttcatcggttcttcttacaattggagtcaacataaagacctaggtgctaataacttaatcccaatggaaattgctctaaagattgctgaaaagataaaagcaaacgagagatttgcagtgtatgttgttattccaatgtggccagaaggtgttccaacaggggctgccacacaaaggattctattttggcagaataaaacaatgcaaatgatgtatgagacaatttacaaggctttggttgaggcagggcttgaagctgcattttctccacaagattatttgaactttttctgtcttggtaatcgagaggccatgaatttgtatgataatgccggtgtgactggagctcctcccccagcaaatagtccacaagcagccagccgaaatagccaacgcttcatgatttatgttcattcaaaaggcatgatagttgatgatgaatatgtgatattggggtctgcaaacatcaaccaacgctccatggaaggaacaagggacagtgagattgcaatgggagcttatcaacctcatcatacgtgggcaagaaaacaatcttatccacatggacaaatccatggatataggatgtcactttgggcagaacatacaggaacaattgaagagtgctttttgcaacccgagagccttgaatgtgtaagaagggttaaagcaatgggtgaaatgaactggaaacaattttcagctaaggaagcaacagagatgaaagggcatctactgaaatacccggtagaagttgatcgaaatggcaaggttagaccccttcaggactgtgaagagttcccggatgtgggaggaaaaatagttggatcttttcttgctatgaaggagaacctaaccatttgatattgagtttattacttattagtttgagtgttttcacattatgctagccaataggatatggtgtatgtatgtacattacaacatagaaacaattttgaaaagcatgatagttgaagaaacaattaccaacccaaaatccaaccaaataaagacaccatactgaaaaagaccaagtgaagatgatgtacaaatatacagctaagttctattgatctttctttcatgggacgtttacaagctttgcatgtctactacttccactcggagaccaagtgcagcaatttcaggcacatcagcaactaccctttggttctcatcattgttttgtcctccaacatattcctcacagaccatatgcctcattctctcagaaaaggattagtttatcagtaacacactgctgcaataacaatagagtttcattccaatgctggattttgtcttgtgcatgcttccttctttctatatgcacacttgccaatttatatatattgaaattaaaaatttaagggggcaagttagttactagtgttttgcttggattatgagtgaaatggttggcagtgggagagacaaactgagtggacttgaactgaggaaatgtcagagaaaaacttttaaa

SEQ ID NO: 131 - DNA, 4128 bp, Glycine max
tccccctcaggtgttatgtccatgaagatatccaatcaaatttgtccacgtggaataacgcatggacaactgttgaatctaccgatctaagaaaacagaaaaaaatgtaagagaaggtaggtattaggtaacttgccatcctagtaatccacgtggactttcgttccctgaacggtggtcttcttcttcaacaacaacaaagctataatattatcagaagggtgataattttgtattgaattgaatggataattatggatcatcttctccataccggtatccaaaccaatatatgtaccctcccaatcctcaccaaccgtaccctcctcctccaggttcagctcctgatccatatgcacaacatgttccttatcaaccatatccttacctttcttcacattccttcaactattcctatcctccacctcctagatcttcctcacattctggccattttgagtattcctatccccctcctcaccctccaccatcttatgctaatcctccttacccttatccctaccatgttcctccaccaaatcatgatcctcccaagccttccctttcacaccatgctagtttccaacatgaaccatctcattattattatcaacaaccaaacgacgcctattcagcttcagctcctcaagtccatcctgatgtccatttgcgcaccaacagcttctctggtccctactggcatgagaacactagcactgcaggagatgaagtgtcacaaactagtgacaattccaagccttctcagggttctgcttacccgtctttggatgatcttatgagtaatgttcgattgtctgatgaccagccaactgctcctgcatcaccacctgcgcctgcagggcaaccatttatgcattccatttcagttccaaagttgcaacagaagagagaggagttttatggatattcgaataactccttctcggggtggggatcctcctaccacagtcgggtggattcgtctagactttcagatttttctggctcatttaatgaatcagtgcatagtcagagtttgcagattgttccagtgcagaataaagggtccttgagagttttgctcctacatggaaatttagatatatgggtccatgaagccaagaatcttccaaatatggacatgtttcacaaaacattaggagatatgtttggtaaattaccaggcagtgtgggcaacaaaattgaaggaactatgaataagaagattactagtgatccttatgtatcaatttcagtatccaatgctgtaattgggaggacttacgtcattagcaactctgaaaatcctgtttggttgcagcatttctatgttcctgttgcatatcatgctgctgaagtgcactttcttgttaaagacagtgatattgtgggttcacagctcattggcattgtggcaattccagtggagaaaatatactcaggagaagtagttgaaggaaccttccctatcctgaataataatgggaagccttgtaagcaaggtgctgtccttaccctatccattcagtacatacctatggagaaattgagcatttatcaccaaggagttggagcagggccagaatacattggggttcccggcacatattttcctttgaggaggggtggaaccgttactctgtatcaagatgctcatgttccagatggcagcctccctaatgtgttgcttgacagtggaatgtattatgtgaatggaaagtgttggcaagatatctttgattccataagtcaagctcggcgtttgatttatattacaggatggtcagtgtggcacaaagtaaggttggttagggatgctgctggttatgcttcagattatacattgggtgatcttctaaggtcaaagtcacaggaaggagtaagagtgcttctccttatctgggatgatcctacatcaagaagcattttaggttataaaacagatggtgtcatggcaactcatgatgaggagactcgtagattttttaagcactcttcagtgcaagtgcttctttgtcctcgcagtggcaaacgacatagctggatcaagcaaaaggaagttggaacaatatatacacatcatcagaaaactgtgattgtggatgctgacgccggaaataatagaagaaaaattatagcatttgttggtggacttgatttgtgtgatgggcgatatgatactccccaccatcctctttttagaacattgaatacaatacataaggatgactaccacaaccctactttcacgggcaatgctggaggttgtccacgggagccatggcatgatttgcattctaaaattgatggtccagcagcttatgatgttttgactaactttgaggagcgctggttaaaagcttcaaaacctcacgggattaaaaagttgaaaatttcagatgatgatgctttgctaaggctggaaagaattccagatgttattggcatcaatgatgctccaagtgttggtgaagatgatcctgaagtttggcatgctcagatatttcgttcaattgattcaaattccgttaagaggtttccaaaggatccaaaagatgcaacaagcaagaacctagtatgtggaaagaatgtgctgattgacatgagcatacatacagcatatgttaagaccattcgtgctgcacaacattacatttatatagagaatcaatatttcattggctcttcatacaattggagtcaacataaagacctaggtgctaataacttaatcccaatggaaattgctctaaagattgctgaaaagataaaagcaaatgagagatttgcagtgtatgttgttattccaatgtggccagaaggtgttccaacaggggctgccacacaaaggattctattttggcagaataaaacaatgcaaatgatgtatgagacaatttacaaggctttggttgaggcagggcttgaagcagcattttctccacaagattatttgaactttttctgtcttggtaatcgagaggccgggaatttgtatgataatgtcagcatgaccggagctcctcccccagcaaatagtccacaagcagccagcagaaatagccaacgcttcatgatttatgttcattctaaaggcatgatagttgatgatgaatatgtgatattggggtctgcaaacatcaaccagcgctccatggaaggaacaagggacagtgagattgcaatgggagcctatcaacctcatcatacttgggcaagaaaacaatcttatccacatggacaaatccatggatataggatgtcactttgggcagaacatacaggaacaattgaagagtgctttttgaaaccggagagccttgaatgtgtaagaagggttagagcaatgggtgaaatgaactggaaacaattttcagctaatgaagcaacagagatgaaagggcatctaatgaaatacccagtagaagttgatcgaaagggcaaggttagaccccttcaggactgtgaagagttcccggatgtaggaggaaaaatagtaggatcttttcttgccatgaaggagaacctaaccatttgatattgagttgctaagtttgagtgttttcacattatgctagccaatatgtacattacagcatagaaacaattttgaaaagcatgatagttgaagaaacaaataccaacccaaaatccaaccaaataaagacaccatactgaaaaaagaccaagtgaagatgtatagatacggctaagttatattgatctttctttcatgggacttttacaagctttgcatttctactacttctactcagagaccaagtgcagcaatttcaggcacatcagcaactaccatttggttctcaccattgttttgtcctccaacatattcctcatagaccatatgatatgccccattctctcagaaaaggattcgtttatcagttacacactgctgcaatagcaatagaattcgattccaatgccggattttgtcttgtgcatgcttccttctttctatatgcacacttgccatttgaaattaaaaatttaagggggcaacttagttactaaggttgccagtgggagagacaaactgagtggacttgaactgaggaaatgtcagagaaaaactcataaagggcctccttcattgtcttttgcaaa

SEQ ID NO: 132 - DNA, 2280 bp, Glycine max
atggacaattatggttctttacaacatccatatgggtatccaaaccctcctcatgatctatatgcacaaccaccatatccatatccatatccaccaaaccctccttatactaacaactttaactactcataccccccacctcctccaccaccacactcctcatctccttattctagccacatagactattcctcataccctcctcctccatctacctcatcacatggctcctttgactatcctatgcctcaaccacctcacacttatctttaccctaatgagttttatagttattctagcaactcctcctcaagtttggaccaggaggatccttctagagtttcagataattctgatgactcagtgcatagtcagagtttgcagattgtgccggctcagctcaaagggtctctgagagttatgctcctccatgggaatttagatatttgggttcatggagccacaaaccttcctaacatggacatgttccacaagacgttggaagacatgttcggtaggttgcccggtaatgttcaacatttctataatgttcctgttgcacatcatgcagctgaagttcattttgttgtcaaggacagtgatgtggtgggttcacagctcattggcgttgtggcaattcctgtggaacaaatatactcgggcaatggtaagccttgtaagccaggtgctgttttgacagtatccattcagtatattccaatggagaaacttaccattaaaggtggaacggttactctatatcaagatgctcatgttccaaatggttgcctccctaatgttgtgcttgaaaatggtatgtattgtgctcatggacagtctaaatcatcagaggagggagtaagagtgcttctccttgtttgggacgaccctacatcaagaaacattctaggttacaaagtggatggtgtgatggcaactcgtgatgaggaaactagacgatttttcaagcactcttctatgcaggtgctgctttgtcctcgcattgctggaaaacgaaatagctgggtcaaacaacagttctacaatttcagctctggaacaatatatacacatcatcagaaaactgtaattgtggatgctgatgctggaaataacaaaagaaaaatagtagcatttgttggcggacttgatttgtgtgatgggagatatgatactccccaccatcctatgtttaggacacttcagacactgcataaggatgactatcacaaccctactttcacgggtaataccggtggttgtccacgggagccatggcatgacttgcattctaaaattgatggtccagcagcttacgatattttgaaaaactttgaggagcgctggttaagagccgcaaaaccaaaagggattcaaaaaatccgaggtattattagtgcatctaatgctcctagtgtcggtgatgataatcctgagtcatggcatgttcagatattccgttcaattgattcaaattctgtcaaggggtttccaaaggagccaaaaaatgcatctagcatgaatcttgtatgtgggaagaatgtgctgattgacatgagcatacatacagcatatgtaaaggccatccgtgttgcacaacattacatttatatagagaatcaatatttcattgggtcttcatataattggagtcaacataaagaccttggtgctaataatttaattcctatggaaattgcactgaagattgctgcaaagataagggcaaacgagagatttgcaggtgttccaactggtgctgccactcaaagaattctattttggcagcataaaacaatgcaaatgatgtatgagacaatttacaaggctttggttgaagttggcctcgaagcagcattctctccacaagactatttgatctttttctgtcttggcaatagggaggccatagatatgtatgagaatatcactgtgtctggaactcctccgccagcaaatacagtcattataagcatcttaatcgcatttagtagaaccaatccacgtttcatgatttatgttcattcaaaaggcatgatagttgatgatgaatatgtcatattggggtctgcaaacatcaaccagcgctctattgagggaacaagagacaccgagattgcaatgggtgcctaccaacctcatcatacgtgggcaagaaggcagtattatcctcgtgggcagggtaaggtaagatcccttccaggccatgaagagttcccggatgtgggaggaaagatagtaggatcattcattgccattcaggagaatctaaccatttga

SEQ ID NO: 133 - DNA, 3701 bp, Glycine max
gatagatccattctcacgagctgcaattgcaattgcaatgcatcttcaacttcttcttcgttgaaccttccaaatcataaacctttccctctcttacctcgcaaatttcttctctttcatacaagttccttctttttattggtattattaccatcatcaatctccaaagttttccatcaaattttcacgcgattagtttcaattcagcacatttatttttcctctatgtttcattctgccgtgtgctatcaataccctttgtgtcaattccatctggggtgtggcccttttgcatgaaagatcaaatcttgaagttcaactgataaataatccaattcaattctgagttgttgttgttgctttgatcaatggacaattatggttcttcacaacatccatatgggtatcccaacccttattcataccctcctcatgatccatatgctcaaccaccatatccatatccatatccatatccatatccatatccacatccaacaaaccctcctcataataacaactcaaactacccataccccccacctcctccaccaccacactcctcatccccttattctagccccataaactattcctcataccctcctcctcctcctcctcctcctcctcctccatctacctcatcacatggctcctttgactatcctatgcctcagccacctcacacttatccttaccctcaccgagtccctccagaatggagtgtcacaacaggaggtggagtgtctcactctcacgctagtgatagttataaccctcctcactctgctgcttaccctactttggatgatctcatgagcaatgataggttgtcagataataataacctcccaagtgcacctcccttgacacattccccaccaattctatatcttgataggagggatgagttttatggttattctagctactcctcctcaagtttggatcagggggatccttctaggctctcagataataatgatgactcagtgaatagtgagagtttgcagattgtgccggctcagcacaaaggatctctgagggttttgctcctccatgggaatttagatatttgggttcatggagccaaaaaccttccaaacatggacatgttccacaagacgttggaggacatgattggtagattccccggtactgttgcgagcaacaagattgaaggaacggtaagccggaagattactagtgatccttatgtgacaatttctgtgtcaaatgctgtaattggtaggacttttgtgattagcaatagtgagaatcctgtgtgggagcaacatttctatgttcctgttgcacaccatgctgctgaagttcattttgttgtgaaggacagtgatgtggtgggttcacagctcattggcgttgtggcaattcctgtggaaaaaatatactcagggcaaaaggtacaagggacctaccctatcctgaacagcaatggtaagccttgtaagccaggtgctgttttgatggtatccattcagtacattccaatgcatacacttatcatgtattaccaaggagttggagctggtcctgactacattggggttcctggcacatattttccattgaggaaaggtggaacagttactctataccaagatgctcatgttccagatggttgcctccctaatgttgtgcttgataatggtgtgtattatgctcatggaaagtgttggcttgacatctttgacgccataaatcgagctaagcgtttgatttacattacggggtggtcggtgtggcacaaagttaggctggtaagggatcctggaaatccatcaaagttcaccctgggtgatattctgaggtctaagtcatcggagggagtaagagtgcttctccttatttgggatgaccctacatcaagaagcattctaggttacaaagtggatggtgtgatggcaactcatgatgaggaaactagacgatttttcaagcactcttctgtgcacgtgctgctttgtcctcgcattgctgcaaaacgtcatagctgggccaaacaaaaggaagttggaacaatatatacacatcatcagaaaactgtaattgtggatgctgatgccggaaataaccaaagaaaaatagtagcatttgttggcggacttgatttgtgtgatgggcgatatgatactccccaccatcctctgtttaggacgctgcagacactgcataaggatgactatcacaaccctactttcacgggtaatactggtggttgtccacgggagccatggcatgacttgcattctaaaattgatggtccagcagcttacgatattttgaaaaactttgaggagcgctggttaagagccgcaaaaccaaaagggattcaaaagttgaggagttcatacgatgatgcgttgcttaagctagacagaatcggagatattattagttcatctaatgctcctagtgtcggtgatgataatcctgagtcatggcatgttcagatattccgttcaattgattcaagttctgtcaaggggtttccaaaggagccaaaagatgcatcaagcatgaatctagtatgtgggaagaatgtgctgattgacatgagcatacatacagcatatgtaaaggccattcgtgctgcacaacattacatttatatagagaatcaatatttcattgggtcttcatataattggagtcaacataaagaccttggtgctaataatttaattcctatggaaattgcgctgaagattgctgcaaagataagggcaaatgagagatttgcagtgtacattgttattccaatgtggccagagggtgttccaactggtgctgccacccaaagaattctattttggcagcataaaacaatgcaaatgatgtatgagacaatttacaaggctttggttgaagttgggcttgaaacagcattctctccacaagactatttgaactttttttgtcttggcaatagggaggccatagatatgtacgagaatatcactgtgtctggaactcctccgccagcaaatagtccacaagcatttagtagaaacaatcgccgtttcatgatttatgttcattcaaaaggcatgatagttgatgatgaatatgtcatattggggtctgcaaacatcaaccagcgctctatggaaggaacaagggacaccgagattgcaatgggtgcgtaccaacctcatcatacctgggcaagaagccagtatcatcctcgtgggcaaatccatggatataggatgtcactttgggctgaacatacgggtacgattgaagactgcttcttacaaccagagagccttgaatgtgttagtaggattagaacaatgggtgagctgaactggaagcaatttgcatcaaatgatgtaacagaaatgacagggcatctgctcaagtacccggtagaagtcgatcgaaagggtaaggtaagatccctcccgggccacgaagagtttccggatgtgggaggaaagattgtaggatcattcattgccattcaggagaatctaaccatttgattacttttttacattcacgttgctggccattaggataggaataggatgaatgtaaatcactggtgtgcatgtaacttaattaaatgataacttttttttgggccaatcatcattcatataaataatcacacacgttaacatttaacattttctggtgaacaatctacacaagagaaatcactttggtga

SEQ ID NO: 134 - DNA, 3291 bp, Glycine max
agtgtttgaccccttcaccgttcactgtacacacacaattcatataagatgtaattcattttcacccaagttgttgtattctgtttccacttgctatatataatattgtattttgtttccacttgttttatcttttgcttttattttcatcattgacagtgcattcaagactttttcttgatcacaattcatgacttattctatatctcattcttctattgctttatcccgtcaaagttgaaacactccaattatatcacaagtgggtcaacaccattttcaaattccagtcttctccctctctagctatgacacctacttcttcaaatgctcattgctcacccccacattccattggtcagattcatcaccaacacctacctattgttctttcacaaactctgacattccaaaaaggagacacttgttagttcttacattacatggctcatttggtttatggtgaaactccgtcttttggagcctcacaccatggacaggctcagcaaattgttccatttcaaaccacttcgagctccttaaggatcctgctcttacatggcaacttagaaatatgggtcaacgaggccagaaaccttcccaacatggacatgttccacaagaaaacgggagaaatggtttccatgttgtcccgaaaacttggcggcaaaatcgaaggtcacatgtccaaagctggaaccagtgatccctatgttacggtatctgtggccggtgctgtgattgccagaacttttgtcatcagaaacagtgagaaccctgtttggacacagcatttcaatgtccccgttgcacatcttgcttctgaagttcactttgttgtcaaggacagtgatattgtgggttctcagattattggagcagtgggaattccagtggaacatttatgtagtggaacaagagttgagggctttttccccatccttggtgctaatgggaaaccatgtaagggtggatcagtgttgagtttatccattcagtacacccctgttgaaaaggtgcctctttatagccatggagtaggtgctggtcctgattatgaaggggtccctggtacctactttccccttagaaaaggtggaaaagttacactttatcaggatgctcatgttgaagaaggttgccttcccagtttgaaggtggatggatatgtgaattacaagcatggaagttgttggcatgacatatttgatgcaataagtgaggctcgtcgattggtttacattgtggggtggtctgtgtactacaatgttagtctcattcgggatagtgctaatggaaaatcctacactttaggtgatcttctcaaagccaaatcacaggaaggtgtgagagtgctgctccttgtttgggatgatcccacgtctaaaagcatgcttggatttaaaacggttggactcatgaacactcatgatgaggacactcgccagtttttcaagaactcttcagtacgagtgcttctttgcccacgagctggtggaaaaggacatagctgggtcaaaacgcaggaagctggaacaatctatacccatcatcagaagacagtcattgtggatgctgatgcaggtcagaataaaagaaaaatcaaagctttcatcggaggtcttgatttatgtgtgggccgatatgataccccaaaccattccatctttaggactttgcagacaacacacaaagatgactatcataatcctaactttgaggggccagttactggttgtccaagacaaccatggcatgatttgcattcccaagttgatggtccagcagcatatgacattctcaccaattttgaggagcgttggttaagggcattaaaaatgcatagatttcaaaagatgaaaagttcacatgatgattcattactgaaaattgatagaatccctgacattgttggcattgatgaagttccttgccagaatgaaaataaccgggagacttggcatgcccaggtcttccgttcaattgattctaattctgtgaaaggatttccaaaggaaccacaagatgctataagaaggaacttggtttgtggaaagaatgtactgatagacatgagcatacattcagcgtatgtcaaggcaattcgagcagcccaaaagtttatctatattgagaaccaatactttcttggctcgtcatataattgggattcttacaaagaccttggtgcaaacaacttaattccaatggaaattgcattaaaaatagccaataaaatcaaacaacatgagagattttctgtgtatattgtcattcctatgtggcctgaaggtgtacctacaagtacagctactcagaggattctcttttggcagttcaaaacaatgcaaatgatgtatgaaacaatttacaaggccctacaggaggctgggcttgacaataagtatgaaccacaggactacttgaatttcttttgccttggcaatcgtgagatacctgacaatgaaaatgttttaaatgatgtaaaaactactggagaaaacaagcctcaggcactcactaaaaagaaccggagattcatgatttatgttcattcaaaaggaatgatagtggatgatgaatatgtgttactggggtctgcaaacataaaccagcgatccatggaaggcaccagagatacagagatagcaatgggggcatatcagcctaatcatacttgggcaaagaagcaatctaaacctcacggacaggtgcatggttatagaatgtcactatggagcgaacatataggagccgtggaagaatgttttgaggaaccagagagccttgaatgtgtaagacggataaggtcattgagtgagtttaactggagacaatatgcagcagaagaggtaactgaaatgaaaagtcatctattaaaatatccgcttgaagttgattcaaagggcaaagtgaagcctctttttggctgtgaggcattcccagacgttggtgggaacataagtggcactttcacactactcaaagaaaatctcaccatctgatcatttacgtgagttctctaactcagtgaatactatagcagattttagtagcttatttacaatatttagattcttttggaaaagaaaagaaaaggagtataaagatttgaacttgtaacctgctttgaagtactagtttactcaatgtcttatttaagatttaaggtagtcttaaataccagctttactattttttagtcgaataaatccatttttcctttttatattaatgtaaggttgtagttatgttgatagatattacggtaatggactttttttttttcaa

SEQ ID NO: 135 - DNA, 3036 bp, Glycine max
atgtggaattctttgaaacccgccagcacagaaacacactctgtcccctccgcgacacaacacaaatccaaaaccagaagctaacaaaaaccgcactctaattcaaaccaccacatccacgtgacttcactgccttcgttttacgctataccaaacccttctacactacaaagcccccgtttcgctcccgggcgtaaattcaaaactatacactcactccctcccatggcggatactggcgacgacaatggcgttacctatcttcacggcgacctcgatttgaaaatcatcgaggcgcgccacttgcccaatatggacatcttctccgagcgcctccgccgctgcgtcaccgcctgcgacactatcaaattccactccgacgctcccgccgccgccgacggcgacggcggcagccagcgtacacggacgcaccatcatcggaggatcatcacgagcgacccgtacgtcaccgtttcggtgccgcaagccacggtggcgcgcacgcgcgtgctgaagaacgcgcagaatcctgtctggaaggaacagttccacatcccgctcgcgcatcccgtggtggatttggagtttcgcgtcaaggacgacgacgttttcggcgcgcagagcatgggaacggtcaaagtcccggcgcggcggattgccaccggagcgaagatttccgagtggtttccggttctgttgccgtccgggaagccgccgaagccggacacggcgctgcacgtggagatgcaattcactccggtgtcggaaaatttactgtaccagcgaggcattgcggcggatcccgagcacaacggcgtgaggcacacgtattttccggtgaggaaggggagttcggtgaggctgtaccaggacgcacattgtacggaatctggtgaagggaagataccggagattaagcttgagaatggaaatgtttataggcacgggaagtgttgggaggatatttgttatgctatttctgaggctcatcacatggtgtatttggttggttggtctatttatcacaaggtgaggctcgttagagagcctactaggccgttaccgcgaggtggcgatttgacgcttggtgagttgcttaagtataagtctgaagaaggggtgagagtgttgttgctggtttgggatgataaaacttcgcacgataaggttttcctcaagacggctggtgtgatggggactcatgatgaggaaaccaggaagttttttaagcattcttctgttatgtgtgttctgtcgcctcggtatgccagcagcaagatgagcttcttgaagcaacaggttgttggaacagtcttcacacaccaccaaaaatgtgtgattgtggacacacaggctgccggcaataaccggaagataactgcttttataggaggtcttgatctttgtgatggtcgctatgacacacccgagcatcgtctgtttcgtaatcttgacgatgtatttgatggcgatttccacaatcctacatttcctgctggaacaagagttcccagacaaccttggcatgatttgcactgtagaatagatggacctgctgcatatgatgttcttattaattttgagcagcgatggagaaaagcaactaagtggaaagagtttgcaatccttttcaaaaaaacctctcaatggcatgatgatgctttaataagaatagaacgcatctcatggatattaagtccttctggtgctgctaccttaaaggataaatcggattattatactgttccagaggatgaccctttagtgtgggtttctagtgaagacgatcctgaaaactggcatgttcagatcttccgatccattgactcaggatccctgaaaggatttcccaaacgtgttgatattgctctgtcccagaatcttatctgtgctaaaaatttggttatagacaaaagcattcaaacagcatacattcaagcgatcagatctgctcaacattttatttatattgaaaaccaatacttcattggatcatcgtatgcatggccagcttataaagatgcaggggctgataatctcatcccaatggaattggcactgaaaattgctagtaaaatcagagctaaggagagatttgctgtctatattattttaccaatgtggccagaaggtgatcctaaaactggggccatgcaagaaatcctcttttggcagggccagacgatgcaaatgatgtatgatgttgttgctagagaattgaaatcaatgcaacttactgatgtgcacccgcaagagtacctcaatttctattgccttggtaatcgagaacactttaatgaagatagttcaagcacaaatggtgcacaggtctcaacggcatataaatatcgccgttttatgatttatgtgcatgctaaagggatgatcgttgatgatgagtatgttataattggatctgctaatataaaccaaagatctatggctggtactaaagatactgagatagctatgggtgcatatcaaccccattacacgtggtcagcaaagaaaagacatccacatggccagatttatggttacagaatgtcactttggggagagcatcttggcatgttagatgaaacttttgaagaaccagggagattggagtgtgtggaaaaagtgaatgagattgccgaaaacaattggaaattattcgcttctgaagatttttcacttttgcagggacatcttctcaagtatcctgtacaggtagattccgatgggaagattagatccctaccagactgtgaaaatttcccggatgctgggggtaagatattgggagctcactcgacaacaattcccgatatcctaacaacttaaactcctgaattcatgttgttgaagatttataaagattgtgtgatgtgttgcctgccccttcctgagaaagaggacaaaaagaagttggggtgaagttatgtagctttctgtacttaaaaatgattgttcggatcacttgtaaatctttcacacggtattgattcatattttgaaaggatcaccagtttatagattgtatccattacccta

SEQ ID NO: 136 - DNA, 3027 bp, Glycine max
aacacaatctgttccctcctcgacgcaacacaacacaacacgaatccaaagcgagaagctaacaaaaaccgtaccctaattcaaaacgaccacttccacgtgacttcacttccttcgtttcacgctataccaaaccttctcttctacactaaaagcccccgtttcgctcccgggcgcaaattcaaaacaatactctcggcgcacgggatcactcactcccatggcggacactggcggcggcgacgacaatggcgttacctatctccacggcgacctcgatttgaaaatcatcgaggcgcgccacttgcccaacatggacatcttctccgagcgtctccgccgctgcgtcacagcctgcgacactatcaaattccactccgaggctcccgccggcggcggcggagccggccagcggaagcaccaccatccgaggatcatcacgagcgatccgtacgtcaccgtttcggtgccgcaagccacggtggcacgcacgcgcgtgctgaagaactcgccgaaccctgtgtgggaggaacagttcaacatcccgctcgcgcatcccgtggtggatttggagtttcgcgtcaaggacgacgacgttttcggcgcgcagaccatgggaacggtcaaggttccggcgcggcggattgccaccggagcgaagatttccgagtggtttccgattctgttgccgtccgggaagccgccgaagccggacacggcgctgcacgtggagatgaaattcactccggtgtgggagaatttactgtaccagcgaggcattgcggcggatcccgaacacaacggcgtgaggcacacgtattttccggtgaggaaggggagttcggtgaggttgtaccaggacgcgcattgtaccgaatctggtgaagggaagttaccggagattaagttggagaatggaaatgtttatagacacgagaagtgttgggaggatatttgttatgctatatctgaggctcatcacatggtgtatttggtgggttggtcgatttatcataaggtgaggctcgttagagagcctactaggccgttgccgcgcggtggcgatttgacgcttggtgagttgcttaagtataagtctgaggaaggggtgagagtgttgttgctggtttgggatgataaaacttcgcatgataaggttttcctcaagacggctggtgtgatggggactcatgatgaggaaaccaggaagttttttaagcattcttctgttatgtgtgttctgtcgcctcggtatgccagcaataaaatgagcttcttgaagcaacaggttgttggaacggtcttcacacaccaccaaaaatgtgtgattgtggacacacaggctgctggtaataaccggaagataactgcttttataggaggtcttgatctatgtgatggtcgctatgacacacccgagcatcgtctgtttcgtaatcttgacgatgtatttgatggtgatttccacaatcctacattttctgctggaacaagagttcctagacaaccatggcatgatttgcactgcagaatagatggacctgctgcatatgatgttcttattaattttgagcagcgatggagaaaagcaactaagtggaaagagtttgcgatccttttcaaaaaatcctctcaatggcatgacgatgctttaataagaatagaacgcatctcatggatattaagtccttctggtgctgctaccttaaaggataaatcggatgattatactgttccagaggatgaccctttagtatgggtttctagtgaagatgatcctgaaaactggcatgttcagatcttccgctccattgactcaggatccctgaaaggatttcccaaacgtgttgatgttgctctgtcccagaatcttatctgtgctaaaaatttggttatagacaaaagcattcaaacagcatacattcaagcgatcagatctgctcaacactttatttatattgaaaaccaatacttcattggatcatcgtatgcatggccagcttataaagatgcaggggctgataatctcatcccaatggaattggcactgaaaattgctagtaaaattagagctaaggagagatttgctgtctacattgttttaccaatgtggccagaaggtgatcctaaaactggggctatgcaagaaatcctcttttggcagggccaaacgatgcaaatgatgtatgatgcagttgctagagaattgaaatcaatgcagcttactgatgtgcacccacaagattacctcaatttttattgccttggtaatcgggaacactttaatgaagatagttcaagcacaaatggtgcacaggtctcaacagcatataaatatcgccgttttatgatttatgtgcatgctaaagggatgatcgtcgatgatgagtatgttataattggatctgctaatataaaccaaagatctatggctggtactaaagatactgagatagctatgggtgcatatcaaccccattacacgtggtcagcaaagaaaagacatccacatggccagatttatggttacagaatgtcactttggggagagcatcttggcatgttagatgaaacttttgaagaaccagagagattggagtgtgtgcataaagtgaataaaattgcagacaacaattggaaattattcgcttctgaagatttctcacttttgcagggacatcttcttaagtatcctgtacaggtagattccgatgggaagattagatccctacctgactgtgagaatttccccgatgccgggggtaagatactgggggctcactccacgacaattccagatatcctaacaacttaaactcctgaattcatgtcgttgaagatttgtaaagattgtgatttgttgcctgccccttcctgagaaagaggacagaaaaagaagttgggggtaaagttatgtagctttctgtacttaaaaatgattgttcagatcacttgtaaatctttcacacagaattgattcatattttgaaaggatcaccagtttatagatatccgttaccctgtcct

SEQ ID NO: 137 - DNA, 3283 bp, Glycine max
ctcttccttctactgctgtcacttacacgtgttcatatatccaaaaaattagacgccaacggcaacaaacacaacaaaacgagtgcccaatcccgttaccttctctttcccgctagctaacgccaccgtatcataatattattattattatttttatttattgcgcacaccgttgccagagtgtgtgccattcccttctgttccgccgccgccgccgaacaaatcaaccaagggacggagagtaatgctgtagcctccgtaacgccgttccgtggtagcgagcgttcgctggttccgctgcgcatttttcagcaacgtaacgctccctatcactctcttccctccgacaatcaattaattaactccttcaatctaatctcaccttgcgttgacccctccgcggtgacaatgcctcacaatcctgacaccgtggtctacctccacggcaccctcgatttggtaatcgaggatgctcggttccttccgaacatggacatgctctccgagcgcgtgcgaaggttcttctctgctcttaacacctgcagcgcctccatcaccgggaaaaggaagcaacgacatgcccgccaccgccaccgcaaaatcatcaccagcgatccttacgtgaccgtctgcctcgccggcgccaccgttgcgcgcacccgcgtgatctcgaactcgcagaacccgacgtgggacgagcacttcaagatcccactcgctcacccggcctcgcaggtcgagttctacgtcaaggacaatgacatgttcggcgccgacctgatcggagtcgccaccgtctcagccgagaggatcctctccggcgaagccatccgcgactggtttccgatcataggaacgttcgggaagccgccgaagcctgactgcgcggtgcgcctggcgatgaaattcacgaggtgcgaggacagttttatgtaccggtcccgcaccgaaacggatccggaccggttcgttgttcgggactcgtattttccggttcggcacggaggatcggtgacgctgtatcaggacgcgcacgtgcctgattcgatgttgccggaggttgagttagaggacggggttgtgtttgagcacgggaagtgctgggaagatatatgtcacgcgatattgggagcgcatcatttggtttacattgtgggttggtccatctaccacaaggtgaagctggtcagagagcctacaaaagccttacctagcggtgggaacttgaatctcggggagttgctcaagtacaagtcgcaagaaggtttgcgagttttactattggtttgggatgataagacttcgcacagcaagtttggcatcaacacgagtggagtaatgcaaacgcatgatgaagaaactcgaaagtttttcaagcattcatcagttagatgtttgctgtcaccaagatatgccagcagtaagcttagcattttcaagcagcaggttgttggcactctctttacacatcatcagaaatgtgtgatagtggatactcaagcacacggtaataatcggaagataactgcatttataggtggtctagatctttgtgatggccggtatgatacacccgagcatagaattttacgtgatatcgacactgtttatcaggacgattatcataatcccacgttttgtgcgggaaccaagggtccaaggcaaccatggcatgatttacattgcaaaattgaaggccctgctgcatatgatatactcactaattttgagcagcgctggagaaaagccaccaaatggtctgagttgggtcggaaactcaagagagtatctcactggaacgatgattctttgatcaagttagaacgcatcttttggattcttagtccttcggaatcaactccagttgatgatcctgaactatgggtttcgaaggaagacgatcctgaaaattggcatgttcaggtttttcgatccatagattctggttctttgaaaggattccctaaggatgtagttgttgccgagactcagaaccttgtttgtgcaaaaaatttggtcatagacaagagtattcaaacagcatatatacatgcgatcagatctgctcaacattttatttatatcgagaatcaatattttattggatcatcctttgcttggccagcttacaaagaagcaggtgctgataacctaattcctgtggagttggcactgaagatagtcagtaagataagatcgaaggagagattcacagtttatattgtcatcccaatgtggcctgaaggttccccttcttctacttcagtgcaagagatactcttttggcagggacaaacaatgaaaatgatgtatgaaatcatagctctggagttaaaatctatgcagcttgatagtcatccacaagattacctcaatttttactgtcttggaaaccgagagcagttgacaactgaagtttcaagttcaagtaattcaccttcagataatggcgaaacggtttcagcctcacaaaagttccgacggtttatgatttatgtacatgccaaaggaatgattgtggatgatgaatatgtaattcttgggtctgccaatataaatcaacgatctttggctggatccagagatactgagatagcaatgggtgcacatcaaccgcatcatacatggagtcagaaaaagaggcatccacatggtcaggtatatgggtatagaatgtctttgtgggcagaacacatggaaaccatagaagcttgcttcaaggagcctgaaagcttggagtgtgtgaaaagtgtgaacaagattgctgaagacaactggaagaagtacacagctgatgactatactccattgcaagggcacataatgaagtatcccgtgtgtgtaaatgcctatgggaaggtaaagtccttaactggatttgagtctttcccagatgttggtggcaaggtgcttggctcccggtctacccttcctgacgctctaactacatagcataccctcttaatttctacgtgaaaataagtaccaaagtctcagagaagaagagagagggatcaattggattttgctggcgtgcttggtgtaaactgttaaaaagaggccttgcccctgcatttttttaaaccatttacacggtggtatagtatgcaacaggctgcgtatatagtaaattattattaatcagtggactgtatgtcacagccacgttgtaaattcgtattagtatccattcttttttgccaagtggtggaacgcgctataaaccatggtatcttaattcttaaatcagtaaccccgcctgaaaggcaattgatttcaagga

SEQ ID NO: 138 - DNA, 3396 bp, Glycine max
aaagctggcctgtcctagccaaaggccccacaaaatatatctagaacttgccataactttcatattcataatctgttgttgctctaaataaacacctttccttctaatcctgccacttacacgtgttcatatatccaaatttagacgccaaaacacaacagaaccagtgcccaatcccgttaccttctctttcccgctaactaacgccaccataacattatattgttatttttatttttatttttatttattgcacacaccgttgccagagtgtgtgccattcccttcggtttcgccgccgaacaaatcgaccaacggagtaatgctgtagcctccgtaacgccgttccgtggtagcgagcgttcgcaggttccgctgcgcattattcagcaacgtaacgctccctatcactctcttcccttcgactattaactaacctccttcaatctaatctcaccctgcggtgacccctccgcggtgacaatgcctcacaatccgcacaccgtggtctacctccacggcaccctcgatttggtaatcgaggaggctcgcttccttccgaacatggacatgctctccgagcgcgtgcggaggttcttctccgctctcaacacctgcagcgcctccatctccgggaaacggaagcagcaacaagcgcgccaccgccaccgcaaaatcatcaccagcgatccttacgtcaccgtgtgcctcgccggggccaccgtggcgcgcacccgcgtgatctcgaactcgcaggacccgacgtggaacgagcacttcaagatcccgctcgcgcacccggcctcgcaggtcgagttctacgtcaaggacaacgacatgttcggcgccgacctgattggagtcgccaccgtctccgccgagaggatcctctccggcgaagccatcagcgactggttcccgatcataggcacgttcgggaagccgccgaagcctgactgcgcggtgcggctggcgatgaaattcacgaggtgcgaggacagtcctatgtaccgggccggcaccgaatcggatccggaccggttcgttgttcgggaatcgtattttccggttcggcgcggaggttcggtgacgctgtatcaggacgcgcacgtgcctgattcgatgttgccggaggttgagttagaggacggggttgtgtttgagcacgggaagtgctgggaagatatatgccacgcgatattggaagcgcatcatttggtttacattgtgggttggtccatctaccacaaggtgaagttggtgagagagcctacaaaacccttacctagcggtggtaacttgagtctcggggagttgctcaagtacaagtcgcaagaaggtttgcgagttttactattggtttgggatgataagacttcgcacagcaagtttttcattaacacgagtggagtaatgcaaacacatgatgaagaaactcgaaagtttttcaagcattcttcagttagatgtttgctgtcaccaagatatgccagcagtaagcttagcattttcaggcagcaggttgttggcactctctttacacatcatcagaaatgtgtgattgtggatactcaagcacacggcaataatcggaagataactgcatttataggtggtctagatctttgtgatggccggtatgatacacccgagcatagaattttacgtgatatcgacactgtttatcaggacgattatcataatcccacattttgtgcgggaaccaagggtccaaggcaaccatggcatgatttacattgcaaaattgaaggcccagctgcatatgatatactcactaattttgagcagcgctggagaaaagccaccagatggtctgagctgggtcgaaaactcaagagagtatctcactggaacgatgattctttgatcaagttagaacgcatctcttggattcttagtccttcggaatcaactccaattgatgatcctgaactatgggtttcaaaggaagacgatcctgaaaattggcatgttcaggtttttcgatccatagattctggttctttgaagggatttcctaaggatgtagtagttgccgagactcagaaccttgtttgtgcaaaaaatttggtcatagacaagagtattcaaacagcatatatacatgcgatcagatctgctcaacattttatttatatcgagaatcaatattttattggatcatcctttgcttggccagcttacaaagaagcaggtgctgataacctaattcctgtggagttggcactgaagatagtcagtaagataagatccaaggagagatttgcagtttatattgtcatcccaatgtggcctgaaggttccccttcttctacttcagtgcaagagatactcttttggcagggacaaacaatgaaaatgatgtatgaaatcattgctcgggagttaaaatctatgcagcttgatagtcatccacaagattacctcaatttttactgtcttgggaaccgagagcagttgacaactgaagtttcgagttcaagtagttcaccttcagataatggcgaaacggtttcagcctcacaaaagttccgacggtttatgatttatgtacatgccaaaggaatgattgtggatgatgaatatgtaattcttgggtctgccaatataaatcaacgatctttggctggatccagagatactgagatagcaatgggtgcatatcaaccccatcatacatggagtcaaaaaaagggacatccacatggtcaggtatatgggtatagaatgtctttgtgggcagaacacacggggaccatagaagcttgcttcaaggagcctgaatgtttggagtgtgtgaaaagtgtgaacaagattgctgaagacaactggaagaagtacacagctgatgattatagtccattgcaagggcacctaatgaagtatcctgtgtctgtaaatgccaatgggaaggtaaagtccttacctggatttgagtctttcccagatgtcggtggcaaggtgcttggctcccggtctacccttcctgatgctctaactacgtaataggcataatagcataccctcttaatttctacgtgaaataagtacaccaagtctcagagaagaagagagggactggattggattgctggcgtgcttggtatataaagttaaaaagaggccttgcccctgcattttttttcaactatttacacggtatagtatgcaacaggctgcgtatagtaaattattaattagtggactgtatgtcacagccacaatgtatatttgtatcgattctttttctgccaagtggtcgaacgcgcaataaaccattgtatcttaattcttaaatcagtcatcccacctaaaaagccattgatttcaacagggtgacaaaacgagttgattagtcggcaactttttttgact

SEQ ID NO: 139 - DNA, 3655 bp, Glycine max
tattccattcactccaaaatggagtaaacgttcatattttttcctcgtgtataggagagagataactaggagagggcacgaagttccttggttccatgcaaaatgtctccaatttctcaatctctccatcatcttccacctcaccaatctctttctttttatatttttttataattattttctcccatgcatgtttttcgtttggaatttgccaattcaggaaatgaaaaaaaaaacaagagagatggtttccaaacttgtaattccacgagatttgccaccattttcggcctaagaaacctctctcctgcttcttgcggacgtgatgttggaccatgctctctgaactgcaacattgttatatgcatgaatccatctacgcacaaatttcttttctttaatttcccctttttttacttttatttcttgtcattaacttcttctccaggtaatcgtttttcttctcctctctttgtcaaagagactggaacctgagaatttgttgaaggggcatgtttgccttgttacaaccaaaagatgatgatatgagataactgaaaggatcataataagttctcaggttgaaatggattgtcatggtggtatttgccaaagctctccaaaccgggagcatgaaggccttaatgaacatgttttcttgcatggtgacttggatctgttgatagtagaagccaagtctcttccaaatttagatttatccactgaagcagttagaaaatgcatcactatgggaaacatgtgccatcctccatttataaaaggacttaagacacactcaggaaaagacaagatgataactagtgacccttatgtttctgtatgcattgctggtgctaccatagctcagactagagtcattgctaactgtgagaaccctttgtgggatgagcaattcattgtgcctgttgctcaccctgcacaaaaactagagttccttgtgaaggacaacgatcttcttggtgctgaactcattggagttgtggagatacctgttcagaagataattgctggaaacactattaatgattggtttcccattattggtcagtatggaaactgcttaaaaccttatcctgaattgcatatttctgttcagtataggcaaattggagtgaaccgttcagagagtatcagtagtggggatggaaaagctttaggagttcctaaaacatatttccctctcaggaaaggagggagtgtgactctatatcaagatgcacatttaccagatggtatgctacctgaaattccacttgagggtggaaaagtgtttcagcagaataaatgttgggaggacatatgccatgcaattttggaagctcatcacctcatatacattataggatggtcagtttatcacccagtgaggcttgtcagagaggcaacaaaaccattgccttcggggggcgagctttcgcttggagagctgttgaagtacaagtcacaagaagggctccgagtggttatgctgatttgggatgacagaacttcacatgacaagtttctgttgaaaacagatggtgtcatgcagactcatgatgaagaaactaaaaagtttttcaaacattctactgttcattgtgtgctatctccacgttatgcaagcaataagctcagtattttcaagcaacaggttgtgggaaccctctttacacatcaccagaaatgtgtgcttgtagacagtctaggttccggcaataatcgaaaaataacagctttcatgggtggtttggatctatgtgatggtagatatgatacacctgagcatcggctctttcgtgatctagatacagtctttcataatgattttcataatcctacatttcaattaaattcaaattcgtgtgcaccaaggcagccatggcatgacttacactgcaaaattgaaggtccagcagcatatgatatattgaccaattttgaacaaagatggaggaaggccaaaaaatggcgcgacttcaggctcaaaaaggtgacaaattggcatgatgatgctttgctaaggctagaccggatttcatggattgtcaaaccttctccttgttccaaaggcgataaatctgtccatgtaaccgatgaaaaagatcctgagagttggaatgtgcagatatttaggtccatagattcaggatccgtgaagggatttccaaaggatgttgacaaagctaagtctcagaatcttttgtgtggaaaaaatttgaaagtagatcaaagcatccatactgcttatgtgagagcaataagatcggctgagcgctttgtatatattgagaatcagtattttttgggctcctcctatcattggccttcatataaaaataatgcaggtgcaaaccacctggttcccatggagttggctttgaaaattgctggtaagatcggtgcaaatgaacgcttttgtgtatatatagttataccaatgtggccagagggtgttccaacaagtgctgctgttcaagaaatattgttctggcagggacagacaatgtctatgatgtacaagattatagctgatgcccttgaaaaagcaggtctctccgataagtatcatccacaagattatctcaacttttactgtcttggaaagagagaaccacaatccacaaatatttcaccaacaccaaatccatcagaaaaccgcgctttggtatcagttaaaaaattcagacgttttatgatttatgtccatgccaaaggaatggtaattgatgacgaatacgtaattattggatcagcaaatattaaccagagatccttagatggttcgagggacacagaaatagctatgggtgcttatcaaccaaattatacatggacagaaaagaatgctcatccacgtggccaggtgtatggatacagaatgtcactgtgggctgagcaccttgctgatcttgatcattgttttactgaacctcacaacctggaatgtgtgagacatgtcaacaaaattgccaaacaaaactgggacatatatgtgtctgaggaagggaatcggatgaggggacacttgatgcaatatccagttaagatcagcaaggatggaaaagttagtgcacttgatgattatgaatcctttcctgatgttggtggcaaagttcttggatcaccaaattcacttccggatgcactaaccgcctgattaactgttatgaaccaatatccccccgacagctcaacattctctaacagattctgttagagggaatccaccaggtgtgagaatggggcgagttgggtactatatatagtacttgtatccgcatccatcccattaaatcattaatgggtactgtattatagtcagagaacaatcaagaggaagatggagcttggaaaatatagatgatgtggtcacattctgcatgactgctctaatttcttaattgagtctgcttttgacgtacttggttgataatgtggtagcatatgcacataatgccaagggtaagcagagcactagattcagttgatgcatgaagtgtattttttggatcatggttttccctttcacgtgtagcaatttcaattcagttgctactttggtggctttttaatatacgggatgaagatgaggttaatggaaagagttgggaacttatgatacattgattatgcataacatatggttcttgta

SEQ ID NO: 140 - DNA, 4188 bp, Glycine max
ttaattcacatcttctcaccatattattattatttcttttgtcatacaagactaattaattcatactttttaaaaaaaattagttgatttagttagtgacaaaatttgtccacaattttgaacaaatgaggatatataaacaaaaaaaaaattgaaaaaaaataaacttgtgtgacaatttgtcataacctgacaagttaataagttgttacctgaccccaaagactaaaataaataaaaaaatcttttaaggatttaaaatcaaaacagagggaaaggactgaaaattatgatggccaaaatatggaagagcaagagagagatgggaataaaaaaagtaagttgataaatgtgataagttatttaaaatgataataaaatatatgaaaatgactaaaaattataaaggaagaaaagtttaaggagaaaaaacatttgtcaggatgataaacatagattaatctttttccttttcttaaacatttccatgtgtataggagagagagaggggtaaccagaagaaagcacaaagttcattggttccatgcaaaatgtctccaatctcttggtctctccatcagcttccacctcaccaatctctttctttttatatttttctataatttttttctcccatgcatggatttcgtttggaatatgccaattcaggaaatgaaaaaccaagagagagatgggttccaaacttctaattccacgagatttgccaccattttcggcctaagaaacctctctcctgcttcttgtggacgtggtgttggaccatgctctgaactgcaacattgttacatgaatccatatacacacaaatttcttttcttttcttttccctttttttacttttatttcttgtcattggcttcttctccaggtaatcgtttttcttctcctctctttgtcaaagagactggaacctctgagaatttgttgaagaggcatgttttccttacaaccaaaagatgatgatgtgaaataactgaaaggatcataaggttgaaatggattgtcatggtggtatttcccaaagctctccaaacagggagtatgaaggccttaatggaccggttttcttacatggtgacttggatctgttgataatagaagccaagtctcttccaaatttagatttatccagtgaaacaattagaaaatgcatcactatgggcaacatgtgccaccctccatttataaaaggactaaagacacactctggaaaagacaagatgataactagtgacccttatgtttctgtatgcattgctggggctaccatagctcagactagagtgattgctaactgtgagaaccctttgtgggatgagcagtttattgtgcctgttgctcaccctgctcaaaaacttgagttccttgtgaaggacaatgatattcttggggctgaactcattggagtggtggagatacctgttcagaagataattgcaggaaatactgttaatgattggtttcccatcattggtcagtacggaaactgcttaaaaccttatcctgaattgcatatttctgttcagtataggcaaattggagtgaaccgttcagaaagtattagtagtggggatggaaaagccttaggagttcctaaaacatatttccctctcaggaaaggagggagtgtgactctatatcaagatgcacatttacctgatggtatgctacctgaaattacacttgagggtggaaaagtgtttcagcataataaatgttgggaggacatatgccatgcaattttggaagctcatcacctgatatacattataggatggtcagtttaccacccagtgaggctggtcagagaggcaacaaaaccattgccttctgggggagagctttcacttggagagctgttgaagtacaagtcacaagaagggctccgagtggttatgctgatttgggatgacagaacttcacatgacaagtttcttttgaaaacagatggtgtcatgcagactcatgatgaagaaactaagaagtttttcaaacattctactgttcattgtgtgctatctccacgctatgcaagcaataagctcagtattttcaagcaacaggttgtgggaaccctctttacgcatcaccagaaatgtgttcttgtagacagtctaggttctgggaataataggaaaataacagctttcattggtggtttggatctatgtgatggtagatatgatacaccggagcatcggctttttcgtgatctagatacagtctttcataatgattttcataatcctacatttcaattacattcgaattcatgtgcaccaaggcagccatggcatgacttacattgcaaaattgaaggtccagcagcatatgatatattgaccaattttgaacaaagatggaggaaggccaaaaaatggcgcgacttcaggctcaaaaaggtgaccaattggcatgatgacgctttgctaaggctagaccggatttcatggattgtcaaaccttctccttcttccaacggcgataaatctgttcatgtaaccgatgaaaatgatcccgagagttggaatgtgcagatatttaggtccatagattcaggatctgtgaagggatttcctaaggatgttgacaaagctaaggctcagaatcttttttgtggaaaaaatttgaaagtagatcaaagcatccatactgcttatgtgagagcaataagatccgctgagcactttgtatatattgagaatcagtattttttgggctcctcctatcattggccttcatataaaaacaatgcaggtgctaaccacttggttcccatggagttggctttgaaaattgctggtaagatcggtgcaaatgaacgtttttgtgtatatatagttataccaatgtggccagagggtgttccaacaagtgctgctgttcaagaaatattgttctggcagggacagacaatgtctatgatgtacaagattgtagctgatgcccttgaaaaagcaggactttcttatcagtatcatccacaagattatctcaatttttactgccttggaaagagagaaccacaatccacaaatatttcaccaacaccaaatccatctgaaaaccgcgctttggtatcagttaaaaaattcagacgttttatgatttatgttcatgccaaaggaatggtagttgatgacgaatacgtaattattggatcagcaaacattaaccagagatccttagatggttcaagggacacagaaatagctatgggtgcctatcaaccaaaatatacatggacagaaaagaatgctcatccacgtggccaggtgtatggatacagaatgtcactgtgggctgagcaccttggcagtcttgatcattgttttgctgaacctcacaacctggaatgtgtcagacatgtcaacaaaattgccaaacgaaactgggacatatatgtgtctgaggaagagaatcggatgaggggacacttgatgcaatatccagttaagatcagcagggatggaaaagtcagtgcacttgatgattatgaatcctttcctgatgttggtggcaaaattcttggatcaccaaattcacttccggatgcattaaccacctgattaaccaaagtcttagaatattcgcctacagatatatatagccgctaagaattgcagctcaaaaaattgccttcctgcacagttatatttaccgttgtgggaacaatagatacattatggtcagagaacaatcaagaggaagatggagcttggagcttggaaaatatagatgatgtggtcacattctgcatgagtgctctaatttcctaattgagtctgcttttgacgtacttggttggctggtgcattgagtaacatctataatgtggtagcatatgcacatgtataatgccaggggtaagcagagcagtagattcagttgatgcatgaaatgtattttttggatcatggtttttcctttcacgtgtagcaattttaatttagttgctagtttggtggctttttaatatacgggatgaagatgaggaatggaaaaagagttgggaacttaagatattcttgctgcataatacatgacatcattgattatgcataacatacagttcttgtatttctgtcccctatactgtaaatctgtaatctagatatgattttcattcaatttgaagaatttgaagttgttaagttgggatttaaa

SEQ ID NO: 141 - DNA, 2468 bp, Glycine max
gtctttggtaacagttgtaacttgacctccattccctcataagtcaaaacacactgcatttttttttatcttcaatttcctccttgtgaatattggataatggaggaaaagcctaagctcctcatccatggaacaattgaagctaccatcttcaatgccacaccttactcaccttcgtttcccttcaattgtgtatgcacaaatggaaagcctgcttatgtgaccatcaacatagacaacaatagggtggcgaaaacgacccaagaacatgaacgtgtgtggaaccaaacctttcagattcagtgtgctcatccagaagactcaactaccacaattacactgaaaacatcatgctccgttttgggaaaattccacgtgcaggccaagcggttgaaggaagagagtttgatcaatggtttcttccctctccttatggaaaatggaaaaccaaatccacaactaaaattaagattcatgttatggttcaagccagcagatatggaaccaagttggacaaagatactaagcaatggggaatttcaagggctgagggatgctacattcccacaaaggtccaattgccaggttaaactctatcatgatgctcaccattcctctactttccaacctccttttgatctatgtggagcaccaagaaagctgtgggaagatgtctataaagccattgagggtgcaaactatttgatttatattgcaggctggtctttcaatcccaagatggttctggttagagatccacaaacagaaatcccacatgctagggagataaagctgggtgaactattgaagaagaaggcagaggaaggagtagctgtgagggttatgatttgggatgatgaaacatctttgccttttattaagaacaaaggtgtgatgaagactcatgatgaggacgcttttgcctacttcaaacacacaaaagtaatatgcagaaagtgtcccaggttacaccacgagtttcccacactctttgctcaccatcagaagaccataactgtggacaccagagcacccaactctgttcgtgccagagaaattatgagctttttgggtggtgtagatttgtgcgatggtcggtatgacacagagaaacactcactgtttcagacactcaccgaggaatcacattaccatgacttctaccagacaaacatagcaggagctagcctcaacaaaggagggccaagagagccttggcatgatgctcatgctagtgtaactggtgatgctgcttgggatgtgttaaccaattttgagcaaagatggacaaagcaatgtgatgcttctcttctagtccctgccaacactctagaaaatctcattcccacatgctcaagccctcccaaagagaggaattggaaagttcaagtatacaggtcaattgaccatgtgtctgctagccagttgtttagaaagctaactgtggagagaagcatccatgaagcctatgttgaagcaattaggcgtgccgataggtttgtgtacatcgaaaaccaatattttattggggggtgccatttgtggcagaaagataggcatagtggatgcaggaatctgattccggtcgagattgcactcaaggtggtcagtaagattaaagcaagagagaggtttgcagtgtacatagtcatcccaatgtggccagaaggagtgcctgaaagtgaaccagttcaagatatactgcactggaccagagaaacaatgataatgatgtataagttgattggagaagcaataatagaaagtggtgagccaggacatccaagagattacttgaatttcttctgccttgcaaatagggaaaagaagggaaaagaggagtatctttcaccacattctccccatcctgaaacacaatactggaatgcacaaaaaaataggaggttcccggtttatgttcactccaagatcatgatagtggacgatatatacatattaataggatcagccaatgtgaaccaaagatccatggatgggcaaagggacactgagattgccattggggcctaccaatctcaagatggagctgatcaccacattataagccgtggtgatattcatgcatacagaatgtcactgtggtatgagcacactggaatcactgaggaattgttcttagagccagaaagtttgtcatgtgttaagagaatgctgtcaataggggatcacatgtggggagtctacagtagtgaagaaactgtggacatggaaggtgtgcaccttgtaagttaccctgtgaaagtaacacaagaagggtctgtgaaggatacggttgatggtggagatcattttcctgacacaaaatctccagtgaaggggaaaagatcaaaattcttagcccctatctttactacttaaccatacaactgagacatggacacacagactagactgaccattcttttgcttttcttttttcacaccgaaataaagtgttcttatttaca

SEQ ID NO: 142 - DNA, 2559 bp, Glycine max
aaaattcatcaattgtgatttggcaattgtaaactcgtttattcctcatgaaaattttaaccgtaagatcaatggaggaaactcctaagctcctccatggaacaattgaagctactatcttcaatgcgtcaccttactcacctttatttcccttcaattgcatatgtgcaaatggaaatcctgcttatgtgactataaagatagacagccagaagttagcaaaaaccagccaagaaagcaaccgtgtgtggaaccaaacttttcagattcaatgtgctcatccagctgattcatgcatcaccataacactgaaaacatcgagttcttccatattggggaagttccatattcaggctcagcagctactgaagaaaggaggtttgatcaatggtttcttccctctcctcatggataatggaaaaccaaacccaaaacttaaattgaagttccagttatggttcaagccggcagaattagaaccaagttgggcgaagatgttgagcaatgactgggaatttcaagggctgagggaggctaccttcccactaaggtccaattgtcaggtcaaactttaccatgatgctcaccattcttctgcttttcaacctccatttgatctatgtggagctccaaaaaagctatgggaggatgtctataaagccattgagggtgcaaagtatttagtttatattgcagggtggtccttcaatcccatgatggttctggttagagatcctctcacagaaatcccacgtgccagaggaataaagttaggtgaactattgaagaagaaggcagaggaaggagtggctgtgagggttatgctttgggatgatgaaacatctttaccctttgttatgaacaaaggtgagctgaacaaccaagatgaggaagcttttgcttatttcaaccacacaaaagtaatatgcagaaagtgtcccaggtcacaccatatgttccccacactctttgctcaccatcagaagactataacagtggacaccaaagcacccaaatctgtcggtgacagagaacttatgagctttctgggtggattagatctgtgtgatggaagatatgactcagagcaacattcattgtttcaaacactcattagggaatctcattgttatgacttctaccaaacaagcattgaaggagctagcctcaacaaaggagggccaagaaaaccttggcatgatgctcatgcttgtgttactggtgaggctgcttgggatgtgttaaccaattttgagcaaagatggacaaagcaatgtgatccttcttttctagtcccttctagcaccttagcaaatcttatgcctaggacaagctcaagcactcctacggagaggaattggaaagttcaagtatacaggtcaattgaccatgtctcagttggtgagttgtctacaaagttaaatgtggagaggagcatccatgaggcttatgttgaagcaattaggcgtgctgaaaggtttatttacattgaaaaccaatgtttcattggggggtgccattggtggaagaaagataggcacagtggctgcactaatctaattccaattgaaattgcactaaaggtggtaagtaagattaaggcaaaggagagattttccgtgtacatagtcataccaatgtggccagaaggagagcctgaaagtgaacctgttcaagatatactgcattggacccgagaaacaatggcaatgatgtataggttgattggagacgcaatacaagaaagtggagaaccagcacaccctagagactacttgaatttcttctgtcttgcaaatagggagcagaagggacaaggggagtatcttccactagattctccccaacctgaaactcaatactggaatgctcaaaaaaataggagattcatggtttatgttcactccaacttcatgatagtggacgacctgtacatattgataggatcagctaatgtaaaccaaagatccatggacgggcaaagggacactgagatagccattggatgctaccagtctcaagatggagatgataacaaccaaatgaacctagatgatattcaagcatatagaatgtctctatggtatgagcacactgttagtgttgatgagttgttcttagagccagaaagattggaatgtgtggagagaatgcgctcaataggagatgaaatgtgggaaatctacagcagtgaagaaattgtggacatggaaggtgtgcaccttgtaacttaccctgtgagagtaacacaagaagggtatgtgaaagacctcactgatggagttcactttcctgatacaaattctttagtgaaagggaaaaggtctaaaatattgccccctatctttaccacttagatatatggttaagttgtgacttatgagcacacaaacacattagtgttctaataaatatgtaaatgtaaactgaaaatacttctcataggtcaatttgtttgtaaaatgtacagtatgatgcatatatcattatattttagtgagctaaaatcataatgtgctttaaattaaattaataataaatacaatcttgtttatttta

SEQ ID NO: 143 - DNA, 2719 bp, Glycine max
gttttccaactttcaattgcattccaaggttccctttgcttcttcatctgcaacagtaaacttacccacctatataaatgtaataatacaacaatcagttattgcaaattggcacgaaatccatcatatgttaaaccaaactcgataaatctctatctctcccgtttcttccttatgaatattttaaccgtaagagcaatcgaggaaactcctaagctcctccatggaacaattgaagctaccatcttcaatgccacaccttactcacctttgtttcccttcaatcgtttttcttgttttcagtgcatatgtgcaaatggaaatcctgcttacgtgactataaagatagacagccagaagtttgcaaaaaccagccaagaaagcaaccgtgtgtggaaccaaacttttcagattcaatgtgctcatccagctgattcatgcatcaccattacccttaaaacatcgcgttcttccgtattgggaaaattccatattcaggctcagcagctattgaagaaaggaggcttgatcaacggcttcttccctctcctcatggataatggaaaaccaaacccaaaacttaagttgaagttccagctatggttcaagccggctgaattggaaccgagttgggcaaagatgttgagcaatgactgggaatttcaagggctgagggaggctaccttcccactaaggtcaaattgtcatgtcaaactttatcatgatgctcaccattcttctgcttttcaacctccatttgatctatgtggagctccaaaaaagctatgggaggatgtctataaagccattgagggtgcgaagtacttagtttatattgcagggtggtccttcaatcccatgatggttctggttagagatcctcacacagaaatcccacatgccagaggaattaagttaggtgaactattgaagaagaaggcagaggaaggagtggctgtgagggttatgctttgggatgatgaaacatctttgccctttgttaagaacaaaggtgaactgaacaaccaagacgaagaagcttttgcttatttcaaccacacaaaagtaatatgcagaaagtgtcccaggttacaccatatgttccccacactctttgctcaccatcagaagactataacagtggacacaaaagcacccaaatctgtcggcgacagagaacttatgagctttctgggtggattagatttgtgtgatggaagatatgacacagagcaacattcattgtttcaaacactcattagggaatctcattgttatgacttctaccaaacaagcattgaaggagctagcctcaacaaaggaggaccaagagagccttggcatgatgctcatgcttgtgttactggtgaggctgcttgggatgtgttaacaaattttgagcaaagatggacaaagcaatgtgatccttcttttctagtcccttctagcaccttggcaaatcttatgcctaggacaagctcaagcactcttatggagaggaattggaaagttcaagtatacaggtcaattgaccatgtctcagttagtgagttgtctacaaagttaaatgtggagaggagcatccatgaggcttatgttgaagcaattaggcgtgccgaaaggtttatttacatcgaaaaccaatatttcattggggggtgccattggtggaagaaagataggcacagtggctgcactaatctaattccaattgaaattgcgctcaaggtggtaagtaagattaaggcaaaggagagatttgctgtgtacatagtcataccaatgtggccagaaggagagcctgaaagtgaacctgttcaagatatactgcattggactagagagaccatgacaatgatgtataggttgattggagaagctatacaagaaagtggagaaccagcacaccctagagactacttgaatttcttctgtcttgcaaatagggagcagaagggacaaggggagtatcttccactagattctccccaacctgaaactcaatactggaatgctcaaaaaaataggagattcatggtttatgttcactccaacttcatgatagtggacgacctgtacatattaattggatcagctaatgtaaaccaacgatccatggacgggaagagggacactgagatagccataggatgctaccagtctcaagatggagatgatgataccaaccaagtgaacctagatgatattcaagcatatagaatgtctctatggtatgagcacactgttagtgttgatgagttgttcttagagccacaaagattggaatgtgtggagagaatgcgctcaataggagatgaaatgtgggaaatctacagcagtgaagaaattgtggacatggaaggggtgcaccttgtaacttaccctgtgagagtcacacaagaagggtatgtgaaaaacctcactgatggagttcattttcctgatacaaattctctagtgaaaggaaaaaggtctaaaatattgccccctatctttaccacttagatatatggttggtttagttatgacttatgagcaaacaagcacattagtgttctaataaatatgtaaatgtaaactgaaaaaataaaaaaataaaaaaccctgtttagccctgtacatgggccggtgtcaaccaactatacttgtcataggtgaatttgtttgcaaaatgtactgtaaatgaggcatatatcattaaaattttagtgagccaaaa

SEQ ID NO: 144 - DNA, 3883 bp, Glycine max
tcggattacggaagctgaagaataccgaaaactctgacaaaaactataaaacccgcaacactgtttgttgtctttgcttcattaaataaagtaccgtgctctcaacttaactcaacttgtgaagtaactgtctgtctccaacattcccatgtcgtctgagccactgcttccaccgtcggaagcattgccagaatctcaccacccctcccggcgatgcggcgaaccggcgtggattttcgaagaattgccgacggcgaccatcgtttccgtgtcgagaccagagaccggagacattagtccaatcctactttcttataccattgagttgcagtacaaacagttcaagtggcgtctagtgaagaaggcatcacaacttctctatttacagttctgtttgcggaaacgtgcattaattgaagattttcatgacaagcaagagcagttaaaagaatggcttcacaacttaggaatagtagatcaaacggtaatggtacaagatgacgaagaacctgatgatggagctgtgcctttacaccatgaagacagtgttaaaaacagatatgttccatctgttgctgctctatcaataatccgtccatcaataggagggcagcagacaattgcagatagagccaaagtcgcaatgcagggttatttgaatcgattcttgggaaacctggatattgtgaattctcaagaggtctgcaggtttttggaagtctccaggctatcctttttacaggagtatggtcccaaactgaaagagggatatgtaatggtgaagcatttgtcaaatatttcacaggattcagatgtatcatgcttcccatgcaattggtttcactgttgtaataacagctggaagaaggtatggtctgttttgaaacctgggtttttggccttcctggatgatccctttaacaacaaaccactggatataatgatttttgatatcctcccttactcaaatggagatggagggaccaaaatatttttagctgatcctgtaaaagaacgcaaccctttgcgttacacattcaaggttactagtggaaataggagcatattgttgagaactaccagcagtgctaaagtaaaagcttgggttactgcaatcaatgaagctagtctaagacctcttgagggctggtgttgtcctcatcgctttggttcctttgctcccataagaggtttgactgaagatgggagccaagcccaatggtttgttgatggacaggcagcatttgaagcaattgctacttcaattcaagatgcaaagtcagagatcttcattacgggttggtggttgtgcccagagctatatctgagacggccttttgatagcttttctacctctcggttagattcattactagaagaaaaggctaaccaaggggttcagatctatgtgcttctctacaaggaggtttctctagctttaaaaatcaacagcttgtacagtatgagaagactgttcaaaattcatgagaatgtgagggtattacgctatcctgatcatttcgctgctcgtgtgtatttatggtcacaccatgaaaaacttgtaattattgattacaagatttgctatatcggaggattagatttatgctttggtcgatatgacacacctgaacataaagtgggtgactgtccttctgtaatatggcctggaaaggactattacaacccaagagaatctgagccaaattcatgggaagacaccatgaaagatgaattggatcgcaagaagtatccccgtatgccatggcacgatgtccattgtgctctttggggacctccctgtcgtgacattgctcggcactttgttcaacgttggaaccatgctaagagaactaaagctccaaatgaacatggaattccgctacttatgcctcaccatcacatggtcctccctcattacatgggaagaagcaaagagatagacattgatgaaaagaaagacaaagacaagaggaaaggaattggcaggcaggattcattttcctcagagtctccaatgcaggatataccactacttttgcctcaagaagctgatggactagatacttcaaatggagatcatacaaatttaagtgaaaattttccattgtcccaaaagctggagcatgaaactttagtttcagacacccagatgaaagggtttcaagatgaagttgttcctttaaacttgggggcacaacctgttgccaatgctctagatgattggtgggaaacaccagaagaaaccaatgatgacattactttggaatatggagaagttggtccacgtactacctgtcactgtcaggtaatcagaagtgtcagccagtggtctgctggaacaagtcagcctgaagaaagcattcacactgcatattgttctcttattgaaaaagcaaagcattttatctacattgagaaccaatttttcatatcaggtctagcaggggatgacataatactcaaccgtgttttggaagcactatacaggcgtattttgcaagcccacaaagatcagaaagattttagagttataattgtgatgcccctcttgcctggtttccagggtggtctggatgatggtggtgctgctactgtaagagccttaacacactggcagtatcgaacaatttctagagaaaatcactccatattagacaatcttgaagctatacttggtcctaagacacaagattatatttctttctatggtctacgatctcatggcagactttatgaaaatggccctgtggctacaagtcaggtatatgtgcacagtaaattgatgataattgatgaccgtatagcttttattggatcatctaatataaatgaccgtagtttgcttggattaagagactctgagattggagtgcttatagaagacaaagaatatgttgactcgttgatgaatggaaaaccatggaaggctgggaaattttcctacagcctccgctgctccctatggtctgagcaccttggtcttcatgccggagagatcagtaaaatcagtgatccggtggcagatacaacctacaaggacttgtggtcagcaactgcaaaggaaaatactaggatataccatgaggtctttgcttgcattcccaacaatcagatacactcaagagctgcacttcggcaaagcatggttcactggaaagaaaaacttggtcataccaccatagatatgggaatagccccagataagttggtctgtcatgagaatggagaaatcaaaataatagaccctatagataggttgaagtctgtgaagggacatcttgtttcctttcccttggagttcatgcgtgaggaagatcttagaccagctgttattgagagcgagttttatgtcgctcctcaagtatatcattaagtaaatatgttgctttgcgggcactctttagaagggaaatgtggaagataagcttggagacaaaggattgaacacaatggaaaagaaagctgaaggagaaaggatacacaatatggttataaattagttatggctcttagctacagtttagaaaggaagtggttatgcagaatccttcttgcttaaaaaaaaaaaaaagtatgcacggttagtaagtgtggaagtatgtgaaaatcgttgcaaataacattgttcagaattaaatggcagtattctatctcaccagaagaattgatggcaatatgccatgcaaccttcatatgttagcactaattctttttttctttttgactggatactgccctaattcattcattgtaaaggaaattgtatatatattcttcttctattgacctgggaattgttcatgtatgattctttgataaggttattaagtgcatgtttatttcagattatttttaaaaataataattgctttatttgggg

SEQ ID NO: 145 - DNA, 3711 bp, Glycine max
atcaaacttgcggactcgtttggccttgttcacagttaaactcttattccgtattattttcctcttctcacgaaaactagcgttctcttctcttctattctctctctctgaattctgattttggatccgaaaccaccaacgacgtcgttgcatcacctcttccttgtcgcattcgatttccgcatagttctctattgccgacgacgattcaattccaatggcgacggagcagttaatgtccggcggcggctcccgctacgtccaaatgaaatcgtctccgccgtcgtctccgccagccgcggcggccgaggagatgtcctcggtcccgtcgttccggcacagcggcgccgaggccaatcggattttcgaggaattgccgaaagcctccatagtctccgtctcccgccccgacgccagcgacatcagccccatgcaactctcttacacaattcaggttcagtacaaacagttcaagtgggagctaacaaagaaagcccatcaagtatttattttgcatttctcgctaaagaaacgtgcctttattgaggaaatccacgagaagcaagagcaggttaaagaatggcttcaaaatctaggaattggagaacacactgctatggtgcaagatgacgatgaaggtgatgatgaaactgtcccgttgcatactgaagaaactcatgaaagtgccaaggacagagatgttccatctagtgctgctctgccaattatacggccagccttgggaagacagcattctattgcagacagggcaaagagagcaatgcaaggatatctgaatcactttctgggaaatatcagtattgtgaactctcatgaggtttgcaagtttttggaggtatcaaagttatctttttcacctgaatatggtcctaagctgaaggaagaatatgtgatggtgaagcatctacccaaaatccagaaggatgatgattccagaaagtgttgtttgtctgactgttttagttgctgtaatgacaattggcaaaaggtatgggctgtactgaaacctggattcttggcattgctggcagatcctttcgatacacagcctctggatatcattgtttttgatgtactgcctgcctcagatgggaatggggatggtcgattatcactggcgagtgagatgaaggaacgaaatcctttacgccattcattcaaggtgacttgtggaatccggagcatcagaattagagtgaaaagtagtagtaaagttaaagattgggttgctgcaatcaatgatgctggactcaggcctcctgaaggctggtgtcatcctcaccgttatggttcatttgctcctccaagaggcctagtcgaagatggaagtcaagcccagtggttcattgatggacgagcagcatttgaggccattgcttcttcaattgaggctgcaaaatcagagatatttatctgtgggtggtggctgtgcccagaactgtacctacggcgacctttccacactcatgcttcgtcaaggcttgataatttgttggaagcaaaagctaagcaaggggttcagatttacattcttctctacaaagaggtggctcttgctttgaaaataaacagtgtttatagcaagaaaaagcttcttagcattcatgagaatgtgagggtattacgctatcctgaccacttttctactggtgtttacctgtggtcgcatcatgaaaaactagtcattattgataatcatatttgctttattggtggactggatttatgctttggtcgttatgacacatctgagcataaagtgggagatttccctcctctaatctggcctggaaaagactattataacccaagagaatctgaacctaattcatgggaagatacaatgaaagatgaattagaacgtgaaaaatatcctcgtatgccttggcatgatgttcattgtgccctttggggaccaccttgccgtgacattgctaggcactttgttcagcgatggaattatgccaagaggaacaaagctccatatgagcaagcaattccattacttatgcctcagcatcatatggttattccacattacttgggaagaagcagagagatacagattgcaagtaggaacattgacaatcatagagttctcaagagagaagattcattttcctcatcttcccaagaccaagatattcctctacttttgcctcaggagtctgatgggttggatactcatgaaggagaccaaaaattgaatggggtaatctccttttcacatcagcttgacaagccaagaaggatcagcagtggtcttccattctcgttccggaaggccaaaattgtagcagttggcccagatacaccaatgaagggctttgtagatgatctagattctgagcatgatcgtgagaaaatgtctcttgatagagtggctcatattgatttacaaagtacaaatccagaatggtgggaaacacaagaacggggtgaccaaggaggttttgctgaagaatcaggacaagttggtcctcttgcttcctgtcgttgccaagttattaggagcgtaagtcaatggtctgctggaacaagtcaaactgaagagagcatccacaatgcctattgctctcttattgagaaagctgaatacttcatctacattgagaatcaattttttatctcgggtctttctggagatgagatgatacggaatcgtgtgttagaagctttatatcgacggattatgcgagcttacaatgacaaaaaatctttcagggttatagttgtcatacctctcctgcctggcttccagggtggtcttgatgatagcggtgcagcatccgtgagggccataatgcattggcagtatcgaaccatttgccgggggcagaattctatcttgcataatctttatgaacttcttggttctaaaatacatgactacatctctttttatggcctaaggtcttacggtagactctctaatggtggccctgtggcaaccagccaggtgtatgttcacagtaaaatcatgattgttgatgattgtattactttgattggatctgctaatattaatgataggagcttacttggctccagagattctgagattggtatagttttagaagacagagagtttattggttcttatatggatggaaagccttggaaagcaggaaagttttccttgaccctccgattgtcattatggtctgaacacttgggtctccctataggagaggtcaatcaaataatggacccagttgttgaatctacttacagggatatttggatggcaacagcaaagacaaatactacaatttaccaggatgtcttttcttgcgtacctaatgatctgatacataccagattttctttcagacaaagtgtggcgttttggaaagaaagaattggtcacacaaccattgatttaggaatagccccagaaaaattagagtcctatcatgatggaggcattaagaacaccgatcccttggagagattagcatcattgaagggtcatctcgtctcctttcccttggagttcatgtgtcaggaaagtctaagacccgcttttaatgaaagcgaatactacgccactcaagttttccattgaggatgtctgcgagtatataacacatcttgggttttttctttttcaatttttacagggaatttgtaatgtaatacttgcagaattcctttttattacaattctgcaagtgagaaaaagaaaag

SEQ ID NO: 146 - DNA, 3922 bp, Glycine max
ctagaaacaaagaagggcgagtgaagaagaaatcaaacttccgcactcgtttggccttgttcacagttcaactcttgttccgtattattttcctcttctcacgaaaactagcgttctcttctctctttctctctctctctgaattttgattttggatcttaaaccaccaacgacgtcgttgcatcatcacttccttgtcgcaattcgattcccgcatcgttctctatcgccgccgccgacgattcaattccaatggcgacggagcagttaatgtcctccgccggcggcggcagctctcgctacgtccaaatgaaatcgtctccgccgccgtcgccgccggccgcggcggccgaggagatttcctcggtcccgtcgttccggcacagcggcgccgaggccaatcggattttcgaggaattgcccaaagccgccatcgtctccgtctctcggcccgacgccagcgacatcagccctatgcaactctcttacacaattcaggttcagtacaaacagttcaagtgggagctaacaaagaaagcccatcaagtatttattttgcatttcgcgctaaagaaacgtgcttttattgaggaaatccacgagaaacaagagcaggttaaagaatggcttcaaaatctaggaattggagaacacactgctatggcgcaagatgacgacgaaggtgatgatgagactgtcccgttgcatactgaagaaactcatgaaagtgccaaggacagagatgttccatctagtgctgctctgccaattatacggccagccttgggaagacagcattctattgcagacagggcaaagagagcaatgcaaggatatctgaatcactttttgggaaatatcagtattgtgaactctcgtgaggtttgcaagttcttggaggtatcgaagttatctttttcacctgaatatggtcctaagctgaaggaagaatacgtgatggtgaagcatctacccaaaatccagaaggatgatgattccaggaagtgttgtttgtctgactgttttagttgctgtaatgacaactggcaaaaggtatgggctgtactgaaacctggattcttggcattgctggcagatcctttcgatacacagcctctagacatcattgtttttgatgtactgcctgcctcagatgggaatggggatggtcgactatcgctggcgagtgaaatgaaggaacgaaatcctttacgtcattcattcaaggtgacttgtggaatccggagcatcagaattagagtgaaaagtagtagtaaagttaaagattgggttgctgcaattaacgatgctggactcaggcctcctgaaggctggtgtcatcctcaccgttatggttcatttgctcctccaagaggcctagttgaagacggaagtcaagcccagtggttcattgatgggcgagcagcatttgaggccattgctttttcaattgaggctgcaaaatcagagatatttatctgtgggtggtggctgtgcccagaactgtatctacggcgacctttccacactcatgcttcgtcaaggcttgataatttgctggaagcaaaagctaagcaaggggttcagatttacattcttctctacaaagaggtggctcttgctttgaaaatcaacagtgtttatagcaagaaaaagcttcttagcattcatgagaatgtgagggtattacgctatcctgaccacttttctactggtgtttacctgtggtcgcatcatgaaaaactagtcattattgataaccatatttgctttattggaggacttgatttgtgctttggtcgttatgacacatctgagcataaagtgggagatttccctcctctaacctggcctggaaaagactattataacccaagagaatctgaaccaaattcatgggaagatacaatgaaagatgaattagaacgtgaaaaatatcctcgtatgccttggcatgatgttcattgtgccctttggggaccaccttgccgtgacattgctaggcactttgttcagcgatggaattatgccaagaggaacaaagctccatatgagcaagcaattccattacttatgcctcagcatcatatggttattccacattacttgggaagaagcagagagatacagattgaaagtaggaacactgacaatcatagagttctcaagagagaagattcattttcctcatcttcccaagaccaagatattcctctacttttgcctcaggagcctgatgggttggatactcatgaaggagaccaaaaattgaatggggtaatctccttttcacatcaccttgacaagccaagaaggatcagcagtggtcttccgttctcgttccggaaggccaaaattgtagcagttggtccagatacaccaatgaagggctttgtagatgatctagattctgagcatggtcttgagaaaatgtctctggatagagtggctcattttgatttacaaagtacaaagccacaatggtgggaaacgcaagaacggggtgaccaaggaggttttgctgaagaatcaggacaagttggtcctcttgcttcctgccgttgccaagttattaggagtgtgagtcaatggtctgctggaacaagtcaaaccgaagagagcatccacaatgcttattgctctcttattgagaaagctgaatacttcatctacattgagaatcaattttttatctcaggtctttctggagatgagatgatacggaatcgtgtgttagaagctttatatcgacggattatgcgagcttacaatgacaaaaaatctttcagggttatagttgtcatacctctcctgcctggcttccagggcggtcttgatgatagtggtgcagcatctgtgagagccataatgcattggcagtatcgaaccatttgccgagggcagaattctatcatgcataatctttatgaacttcttggttctaaaatacatgactacatctctttttatggcctaaggtcttatggtagactctctaatggtggccctgtggcaaccagccaggtgtatgttcacagtaaaatcatgattgttgatgattgtattactttgattggatctgctaatattaatgataggagcttacttggctccagagattctgagattggtatagttttagaagacagagagtttattggttcttatatggatggaaagccttggaaagcaggaaagttttccttgaccctccgattgtcattatggtctgaacacttgggtctccctataggagaggtcaatcaaataatggacccagtcgttgaatctacttacagggatatttggatggcaacagcaaagacaaatactacaatttaccaggatgtcttttcttgcgtacctaatgatctgatacacaccagacttgctttcagacaaagtgtggctttctggaaagaaagaattggtcacacgaccattgatttaggaatagccccagaaaaattagaatcctattatgacggaggcattacaaacaccgatcccttggagagattagcatcagtgaagggtcatctcgtttcctttcccttggaattcatgtgtcaggaaagtctaagacctgcttttaatgaaagcgaatactacgctactcaagttttccattgagtatgatgtctccaagtatataacacgtcttgggttttttctttttcaatttttacagggaatttgtagtttaatacttgcagaattcctttttattacaattctgcaagtgagaaaaagaaaagtggggtgggggtggggggagacagggtataatcaccatattcttgtaaagaatgtatctgtaactgctcactgtaaaaagaacatcagtttaatttttatagaaaaagaaaaatctgttcaataatatgcgctgatatttattgtcagatatttttctttcttc

SEQ ID NO: 147 - DNA, 3390 bp, Glycine max
cggtcacaatttggtgttttcagtaataatagaaatatcgaggcagtgtttctgtattctagaagtagaaggagccccctagttcgcgttcgttctccacacgcttttctcatcacacacgaatgcttctttgatcatggcttccacagtttcttcgatcctccgagcttctaggtccaaactttcttcttcctcctccgcttctctttctagaaccttagctcgctctgctcctcgccgatcccccggctcctcatccgccgccacccgctccttcggctccgccgtcccgcgatggagccacggcgtcgactggcgctctccgctcggcctccgccctcagatcagagccgccgctcccctcatcgaacgcttccaccgcaggatcgccactagcgctactgataatcctttcaagggaaacctgacgagtctccctaagcctggtggtggcgagtttggaaagttctacagccttccgtcgctcaacgatccgagaatcgataggttaccatactctatcagaattctccttgaatctgccattcgtaattgtgacaatttccaagtaaaaaaggaagatgttgagaagattattgactgggaaaactcttctgtgaagcaagttgagattcctttcaagcctgctcgtgttctactgcaggattttactggagtccctgctgttgttgacctggcttgcatgcgtgatgctatgaataagcttggcagtgattctaataagattaatcctctggttcctgttgatcttgtcattgatcattcagttcaagttgatgtagcaaggtcagagaatgcagtgcaagccaatatggagcttgagtttcagagaaacaaggagagatttgcttttcttaaatgggggtcaaatgctttccgtaatatgcttgttgtccctcctggatctggtatagtacatcaggtcaatcttgaatatcttggacgcgttgttttcaatactgagggcttgctctatcctgacagtgtagttggaactgattcacatacaacaatgatagatgggcttggagttgctggatggggcgttggtggtattgaagcagaggcagcaatgcttggccagcctatgagcatggtgttacctggtgttgttgggttcaagttatctggaaaactgcgcaatggtgttacagcaactgacttggttctaactgtgacacaaatacttaggaaacatggtgttgtagggaaatttgttgaattttatggtgatggtatgggtgagttgtcattagctgacagggccactattgccaacatgtctccagaatatggtgcaaccatgggcttcttccctgtagatcacgttacattgcaatacctcaaattaactggacgaagtgatgagactgtggcaatgatagaggcctatctcagggcaaacaaattgtttatcgactataatgagcctcaaccagacagagtttattcatcctatctcgaattgaaccttgacgaagttgaaccatgcatctctggacccaagagacctcatgatcgggtgcctttgaaagaaatgaaggctgattggcatgcttgtctcgacaacaatgtgggattcaaggggtttgctataccaaaagatgtacaaggcaaagttgcaaaatttgatttccatgggcagccagcagagctcaagcatggaagtgttgtgattgctgcaatcacaagctgtacaaatacatcaaacccaagtgttatgcttggggctggtctcgtggcaaagaaggctcacgagctaggtttgcaggttaagccatgggtaaaaacaagtcttgctcctggctctggagttgttacaaaatatctactcaagagtggcctgcaaaagtatctaaatgaacagggtttcaatattgttggatttggctgtaccacatgtattggcaattcaggggaactagaccaatccgttgcttctgctatctctgaaaatgacattgtagctgctgctgtgttgtctgggaaccgtaattttgaaggccgtgtgcatcccttgacaagagctaactaccttgcctcaccacctctagtcgttgcttatgctcttgctggcacagttgacattgactttgaaaaggagccaataggaacagggaaggatggaaataatgtttacttaagggatatttggccatccactcaagaaattgcagaggctgtgcaatccagtgtgttgcctgacatgtttcgaagtacatatgaagctattaccaaaggtaacactatgtggaaccaactacaagttcctgctgagaccctgtactcatgggaccccaagtcaacatatattcatgaacctccatacttcaagggcatgactatggatcctcctggagctcatggtgtgaaagatgcctattgtctgctgaattttggtgacagtataacgaccgatcacatttctcctgctggaaacattaacaaggatagtcctgctgcaaagtaccttctggatcgaggtgtggaacaaaaggacttcaactcttatgggagtcgtcggggcaatgatgaagtgatggcaaggggaacttttgccaacattcgtcttgttaacaagctcttgaatggagaagttggtcccaagacagttcacattccgaccggggagaagctttatgtgtttgatgcagcccagagatacaaggctgaagggcaggacaccattgtgctggctggagctgaatatgggagtggaagttccagagattgggctgccaagggtcccatgctattgggtgtcaaagctgtgatagctaaaagttttgagagaattcatcgtagcaatttggtaggaatgggtattgttcctctttgctttaaatctggtgaggatgctgacacattgggattgactggtcacgaacgttatactattgacctcccaagtaacatcagcgagataaggcctggccaagatgtcactgtaacaaccaatactggaaaatctttcacctgcacagttcgcttcgatactgaggtggaacttgcttactttaacaatgggggcattcttccgtatgtcatcaggaacctcattaagcagtgaagtcatggctgatgggaaatgttaaactatgttgccactgcgtgtacacgttttgagtggtggtaataaaatgtgagagaaatgagaataaattcaataaataggaaagatcccttcttaagaaggcaattttttgacatttccaggtgtttatattaggcctgtaaacatggagtgcattgattctagatttctcatgtctgcgttgtgtacccattgaacaatggggacaattgtatttttccatgccgatggcagtgaatattcttttcatttaaatactccccttaattttctta

SEQ ID NO: 148 - DNA, 1580 bp, Glycine max
aaattctcattccatttcctcaatttctcaaaatcatcaatcaatcaataaaaataacaattaaccacacgactcacgacccagtaaccgggttctgcaaatttcgccacttgcagatgaaaagttccaaactttccactccaatccccggttaaatcctaaccccttgttcctttcactggttcttagaactactaggaccttgccaccaccatggctgccaaaaaggcatgtgagacattctcaaagtcattgattgaggaagtgaatagatggggttgcttgaagcagacaggggtgagtctcaggtacatgatggaattcgggtccaaacccactaacaagaatttgctgatctctgcccagtttcttcacaaggaacttgccatcagaattgccagaagggccgttgaacttgagaatcttccctatggtttgtctcaaaaacctgctgttctgaaggttagggattggtatgtggattctttccgtgatgtcagagccttccctgacatcaagaatgtgaatgatgaaagagagttcactgaaatgattaaggccatcaaagtgaggcacaacaatgtggtacccacaatggccatgggagttcagcaattgaagaaaggtatggatccaaagattgtttatgaagatcttgttgagattcatcagttccttgaccgcttctacatgtcaagaattggaatccgtatgcttatcgggcagcatgttgagttgcacaatcccaatcctcctccccacgtcgtgggttacatacacacgaaaatgtctcctgtggaggtggcaaggaatgccagtgaagatgcacgttctatatgttgtcgtgaatatggaagtgcccctgatgtccatatttatggagatcctaattttacttttccgtatgttccagctcacttgcatcttatggtatttgagttggttaagaactcactgcgtgctgtacaagagcgttttatgaattccgataaagttgcacctcccattagaataatagttgctgatggaatagaggatgttaccataaaggtctcagatgagggaggtggaattgcaagaagtggtttgcctaaaatttttacatatctatatagtactgccagaaacccattggatgagcattcggatcttggaataggtgataatgtgacaatggctggatatggatatggtcttcctattagtcgtctatatgctcggtattttggaggtgatcttcaaataatctctatggaaggatatggcactgatgcatatctccatttgtctcgtttgggagattcacaagaacctttgccttgaaagtacttttcagtcagttaccgtaagtaactcagtaacattgtgctagggaaaacaccattgctagcataaaaaacaaaaagtactatttgctgtcaattttttacattctaataatttgacagatttcctgtaaatatgtggtacaaaagattgtgcatggtgatgaccccccttctttgccttcagatccagctttgggaatttgttctttttatcttctgaaaaaaaaaatgaatatgcccttttatcctaaa

SEQ ID NO: 149 - DNA, 716 bp, Brassica napus
atctgaaactttttgctaagggaatatttccgatatccgattgaggaagtagggtgatgaacggcgcttctccagctcattcatcggtatcgacaacagccgtagcaggaggcggtggaagcagcggagccgcagctggactagacgatttcccatttccaccggatattccttctatgcaggaccgaaaggacgaagccatgcgagttttgaaaactgatttgatgggagagctagacaaagaggttaaatctttggaagaagacagttggatgttccaaggtcctcgttctcgtatccatcttatctccagaagagaaggtaactttctcaagagagactgtgaagctgtggttaaatcaagcactgttcagctgcccagatgatcagatttaaagatgaaaaattccggaaaaaggggtttgtgaaagctttgcttgatgcatctctctttggttacaaatgccactaaaacgttgactctcttgttttcctccctttcctactgctattttttttttgttaaaaagtcactggcttgattgatgccaaaaagaagaagccacagtatctaattgatttttgaatctaacatctcaagcctctgaatcattgtttcgtttccagattttatattttacaacagcatttggttaactggttgttaaatcttaactctatggtgttgtataatgtgttgattccattgagtacta

SEQ ID NO: 150 - DNA, 828 bp, Brassica napus
atgtttaccactttcatggtaccactttcatgctcttggagagaagtcttatctcacgccaatctctcatttcccactatgaggaatgaggataattacctagacctcaacaatctgccagatgattcttatagagatggcaataagcaaaccctggaggaaggttcttcctctggtcaaagaaagaagaaaggtagtaaagaagggaaagatgagagcgggaaggtgtatgaatgtcgattttgttcactgaagttctgcaaatcccaagctcttggtggccacatgaatcgccaccgacaaggcatggagacggagacattgaatcaagcccgtcaattggtctaccgtaacgataccttaaccccaccaggaattacacctttcggatatcaaaccgcagatccaacaatataccggtcggtttactcttcaccgatgctatataccggaagctcctcaacaaacttggttccccaaccgcttcaaccaccatatcaatactcttcaaaccaatactcgccctacaacaacatgaatgattattacttcagccaatcctttcgaggcaatagaagcatctctccaaaccctaatcttcccacaacaacaaccgttaattacatggctggtggtcctgtggaatcaagctacacttgcgtcggtgaacccattgatcagaccggtttttctaaccgtggctccgccatagtccgtgcgcccccgctggaaccgccacaagttcgtgatggtgacgcttcacggcagcgtttggatcactctcttaggttaccaatgaaccggtttcaagatcatcactcgctctga

SEQ ID NO: 151 - DNA, 1182 bp, Brassica napus
attgaaactcaaaagtttgctcctttgaatcgatcttcgtctctagtgaggaggatgcagaatcagaatgatacggtgaaggatgatgcggagctcgctgcttccatctcggctgaacaatggggatgctgttcagtggaggaaccatcttttcaagatgatgaagctgctaaagttccttatgttggtgataaggagcctatgtctagtttatcttcagagtaccaagcagggagtcccattttgcttgagaagataaaggtactggacagtcaatatgttgcaatcaggcgaacaagaggagatggaaactgcttcttccgaagttttatgttctcttaccttgagcatattttggaatcacaagatggtgctgaagttgaccgtatcaaggtcaatgttgaaaaatgtagaaagaatctgcagaacttaggctacacagatttcacatttgaggacttctttgcgttgttccttgagcaactagatgacatcctccaaggaggcgaagagtctataagctatgatgagctggttaacagaagtagagatcagtctgtttccgactacattgtgatgttcttcaggtttgttactgctggtgaaataaaaacgcgtgctgagttcttcgagccttttataacaggattatctaataccacagtggatcagttttgcaagacatcagttgaaccgatgggggaagagagtgaccatattcacataacagctttgtcggacgcgcttggtgttgcaatccgggttgtgtatcttgaccgtagctcatgtgatactggaggtggtgtcactgtgaaccatcacgactttgttcccgttggcagtggcactaatgagaaagaagaagcttcttctgctgctccctttataacattgctctatcgtccaggccattacgatatcctctaccccaaggtattggagaatgtggaaaaatgatcatttaatgattgcaaaactgtggtaatatggattctttgaatcatggtacaccatctctttgctccttgattatgatcaaaacccttgcgacatcagaaaatggatttttttgtttgtttgttttactataacattcgtgatagtctctccttttgtgaagtgtactaaaatgaatcagaagtgtttgcaatataaacaatgacaagagtctaagtttgtttt

SEQ ID NO: 152 - DNA, 885 bp, Glycine max
actgattcaaatttcaaagttggctcgatcatcaaatcaaacaaacacctgagaagtttgtgtcgtgttacgcaacacactcaaagcttgattcttcagatttccgaatcccgacgtaagctgaaaaaacacgaattggctcttattcatattcctattcagaaaaaaaccaattttggaggaacgatgaatagttcatcgccggctcactcttcgctatcgacgacggcggttgtaggcggtggtggtggtggcggcggcagcagcaacgccactgtttccattgacgatttccatctcccttgtgatcccatctcatcgcaagaacggaaagacgaggccatgatagttttaaaatcagatctcatggctgcactcgacaaggaagttaaatccttggttgaagataactggaagtttgaagggcctcgttcgcggatccacctagtatcacatcgaggtggtcatctctataggccaacagaaatttctaagaattggaatttgactccaccaaaatagttggaacactcaccttgtaacactgtgcctctattataaagtgattatggttgtgatctgcagataagaactgctatgccaatttctttcccccgtggtagaaaacacagctgttagttgttactctacatcttcaggtgacatgacatgtagttctgtaagggcatgaagattgcaaatgaaggttctttctatgcaagattgttagtcacattttctgctagtctttctaactgggtcgagaagctggtgtttttaacatttatgtggtattattgctcttatttcgagggatcaatgattaattgccgttgattgttcgtaaaactatctatctatacagagggattaaattacatcgtt

SEQ ID NO: 153 - DNA, 1429 bp, Glycine max
taaagtcacgagacccactgtccaattattcattcaatttttgtgtgggggggcggggggagataagagagagagagagagtggcagaggaactgatagagaactttcaaagctctttatcttctaccatcactcaaccagcctctatattgcagtctcaaactgaaagtctaaatttttttgtaaaaagctttagttttatccctacccccaccccatctgaaagaaagagtgtttgcctcacatcatttttcccctttctgtctctctctctgtcggtaccatgagaccagaacgaaaccccttagatcttaacaatttgcccgatgagtactctagagatggcaaacaagtcctcgaagaccatacctcttcatccggttgcaggaaaaagaaaagcggcgggaaggatggaaaagacgagtgtgggaaggtctacgagtgtagattttgttccctcaagttctgcaagtctcaggctcttgggggacacatgaaccgccaccgccaagagagggaaacggagacgctgaaccaggctcgtcaactggtctttcgttgtgatcataacattgctgcacaaggtgcccctcacttaggatgctgccaaacaataggaacggggggttatcatccctcaggagacccaacagtgcctctaagattcccaagatacttctcaggttcatcctcaactcacatgccaccatccccgccaccgccgccgccaccgcaacgaccatacctatacccttcacctacgaggccagtgtcatttgggtcatcacacttccctctccagcatgcagtgaacgattactatgtgggccacgtgatgagtggtggcagccacggacactatgttggaggagagagcacaaggagttacacgtgcattggtgcaccggtggggcaaggtggcggattcgctggtggtaaggaggggtctgcagtgcaggaggaagggttgagtacttggggaaggggctattcaggtgcacaggatcgtttggatcctccctcagcgatcaatcggtttcaagatggtttctaaagagatgagagattctttgtttgagtggtttttggtttgtgttatgtttctgttatgttatgtggtatcatcataaagacacgcaatccagagagagagagaggtggtttttggtttatctacagtaaccagggacagcttttgagctcatggacacgctcagctactttggcttggagttgtgggtgggatttcttctcaacatcgccttttgtattggtagctagctagctagcttggacaaccagttagatttgaactgaaactttccaaactccttttcctttgcatgccaaattacaaccattttccttctcagtaatttgttctttcaatatccttctattatattacactagtaactagtaagtaata

SEQ ID NO: 154 - DNA, 1436 bp, Glycine max
ttaaagtcacgagacccactgtccaattattcattcaatttttgtgtgggggggcggggggagataagagagagagagagagtggcagaggaactgatagagaactttcaaagctctttatcttctaccatcactcaaccagcctctatattgcagtctcaaactgaaagtctaaatttttttgtaaaaagctttagttttatccctacccccaccccatctgaaagaaagagtgtttgcctcacatcatttttcccctttctgtctctctctctgtcggtaccatgagaccagaacgaaaccccttagatcttaacaatttgcccgatgagtactctagagatggcaaacaagtcctcgaagaccatacctcttcatccgttgcaggttgcaggaaaaagaaaagcggcgggaaggatggaaaagacgagtgtgggaaggtctacgagtgtagattttgttccctcaagttctgcaagtctcaggctcttgggggacacatgaaccgccaccgccaagagagggaaacggagacgctgaaccaggctcgtcaactggtctttcgttgtgatcataacattgctgcacaaggtgcccctcacttaggatgctgccaaacaataggaacggggggttatcatccctcaggagacccaacagtgcctctaagattcccaagatacttctcaggttcatcctcaactcacatgccaccatccccgccaccgccgccgccaccgcaacgaccatacctatacccttcacctacgaggccagtgtcatttgggtcatcacacttccctctccagcatgcagtgaacgattactatgtgggccacgtgatgagtggtggcagccacggacactatgttggaggagagagcacaaggagttacacgtgcattggtgcaccggtggggcaaggtggcggattcgctggtggtaaggaggggtctgcagtgcaggaggaagggttgagtacttggggaaggggctattcaggtgcacaggatcgtttggatcctccctcagcgatcaatcggtttcaagatggtttctaaagagatgagagattctttgtttgagtggtttttggtttgtgttatgtttctgttatgttatgtggtatcatcataaagacacgcaatccagagagagagagaggtggtttttggtttatctacagtaaccagggacagcttttgagctcatggacacgctcagctactttggcttggagttgtgggtgggatttcttctcaacatcgccttttgtattggtagctagctagctagcttggacaaccagttagatttgaactgaaactttccaaactccttttcctttgcatgccaaattacaaccattttccttctcagtaatttgttctttcaatatccttctattatattacactagtaactagtaagtaata

SEQ ID NO: 155 - DNA, 1526 bp, Glycine max
ttgcaaaaaaactgattaagttaagccccccacttccactaccacactcacgctctctttttaaagtcacgagacccactgtcccattgttcattcaatttttggtgtggggggagataagagagagagagagagagtggcagaggaaccgatagggaactttcaaagctctttatcttctaccatcactcaactagcctctatattgcagtctcaaactgaaagtctcacaaattttgtagaaaactgtagttttatccccacccccctcccccatctgaaagaaagagtatttgcctcgcatcatttttcttttctttctctctttctgtctctctctctgtcggtaccatgagaccagaacgaaacccattagatcttaacaatttgcccgatgagtactctagggatggcaaacaagtcctcgaagaccatacctcttcacccggttgcaggaaaaagaaaagcggcgggaaggatggaaaagacgagtgtgggaaggtctacgagtgtagattttgttccctcaagttctgcaagtctcaggctcttgggggacacatgaaccgccaccgccaagagagggaaacggagacgctgaaccaggctcgtcaactggtatttcgtagcgatcatatcattgctccacaaggtgcccctcacttaggatgctgccagccaataggaacggggggttatcacccatcaggagacccaacagtgcctctaagattcccgagatacttctcaggttcatcctcaactcacatgccaccaccgccgccgccgccgccgccaccgcaacaatcacacctatacgcatcaccttcgaggccagtgtcatttgggtcatcacacttcccccaccagcatgctgtgaacgattactatgtgggccacgtgatgagtggtgggagccacggacactatgttggaggagagagcacgagtagttacacgtacattggtgccccggtggggcaagctggtggattcgctggtggtggtaaggaggggtcagcagtgcaggaggaagggttgagttggggaaggagctattcaggaggagcacagcatcgtttggatcctccctcagcgatcaatcggtttcatgatggtttctaatgagatgagatgagatgagagattcttttgtttgagtgtttttggtttgcgttttgtgttatgttattttatgtggtatcatcataaagacacgcaatccagagagagagacataacaagctgacacatggggtcatggagaggagggtatagctaaggctaggatgaagagagagagtgtgcgtgagaggtggtttttggtttatctacagtaaccaggaacagcttttgagctcatggacacgctcagctactttggcttggagttatgggtgggatttcttctcaacatcgccttttgtattggtagctacctatcttggacaaccagttagatatgaactgaaactttccaaactccttttgctttgcatgccaaattacaaccattttccttctaa

SEQ ID NO: 156 - DNA, 963 bp, Glycine max
atggcgagtaatttagcattttccattgctattgctgttgtatggctatctagcatactagtgttcacacaagcacaatttcaattccaacctcaaccgattatgaccccattggcagtttttgagccatcttcagttagtgacatctcaagtttgataaaattctcaaactctcttgcaacccctttcaccatagcacgagatgcggtggtgttaaatataactaatctcaatgattttcgaaatgggttagggattttggtggctgattgtgatcatgatgggaagaggaaaggagaccttgtgacttgctctaaggagaagaactcggatacattttatgctgtccttggaggattaggtcagtttggggtgataacaagagcaagaatacctctaggagctgcacctactagggcaattttttatgtcggatatttgcaggttaaatggcttcacctgctatacaacaacttcactgcattttctggagaccaagaacatttaatctcgttcagtgaaagaaatgagattattgcagcagattatgtagaaggtatgcttctattgaatcagccaccattggatctttccttttatgcagcttctgatcaacagaggataacgacactggtaactcaatatggcatcgtctacatcttagagcttgtcaaatactatgacaacaactctcaagcacacatcaatgaggatcttgtgaatttggtaaaagggttaaattttgtacctacatttatgttagaaaaagatgcatcatacgaagagttcttaaacagagttcatgttgccgagctagttcttaggccaaaaggactttcgaaaattcctcatccttggttgaacatctgggttccaagatctcgaatctcatatttcaatgatggtgtcttcaaggacattattcttaagcaaaatattgctgtcggaatctctttagtctaa

SEQ ID NO: 157 - DNA, 1547 bp, Glycine max
atctgttgggaatttagggatttgcttttactgatctcagtcttccacctcactgtcctagattgtggggtttctcttttcagttctcatcgtaactaccatagttgctgctccgaaaagggttttcctaacaccgcccatgcaatcaatttccgggttgtacaattcgtgaataggttgttgcttgttctgaaaagtagtggatagtaaaaaatattgaactttttttgagagaaaaatgcagagtaaagaagctgttgtggaagatggggaaataaagagtgtgactgctgtagggtctgaaattgatgggtggaccaattttggggacgatgacataatgcagcagcagtatacaattcagtctgaagaggctaagaaagttccatctgtgggcgacaaggaaccactgagtagcttagctgctgaatataaatcaggcagtcctatcttgctggagaaaataaaggtgcttgatgagcaatacgctgccattcgtcgtactcgaggagatggaaactgcttctttcgaagctttatgttttcatatcttgagcatgttatgaaatgtcaagaccaagcagaagttgatcgtatccaagccaatgttgaaaaaagtagaaaagcactgcagaccttgggttatgcagacttgacttttgaagatttttttgcgttattccttgagcagctggaatctgttattcaagggaaagagacttccataagtcatgaagagcttgttcttagaagccgagatcagtcagtatctgattatgtcgttatgttcttcagatttgttacctctgccgcaatacaaaagcgcacagaattttttgaaccattcatactaggcttaactaatacaacggtcgagcagttttgcaaatcatctgttgaaccaatgggtgaagagagcgaccatgtgcacattactgccctttcagatgcattgggcattccagtccgtgttgtgtaccttgaccgcagctcaagtgatactggtggtgtcagtgtaaatcatcatgatttcatgccagtggctggtgatctcccaaatgctagttgcagctctgaaaagaacattcctttcatcacactactatatcgtcctggtcactatgacatcctctatccaaaatgatgacttttttggggaaaagaccctttctttgttacttttttggtggtggtgtggagccgcaacagctctgcactcagcccggttgctataggacatgtgtggtctgtaccttgttaatgttgaatggtcaattttcttgaacgttacctgtttagaagagattgatcaacaaagtacgtcaacattaacacgctaacaatttaaaacccagcttgatgtttgctgctttacatgttatccatgatttcattgttctcaatatctctccatgggggtttagtgattagtgtaatagcatggctccttgtagcttctgtagaatgaagcacgtgcattatctcaatggcaatggcaatggcagtttctgttttgcaaaaaaaagaaaaaaaaaaaaaaaaaaaaa

SEQ ID NO: 158 - DNA, 1011 bp, Brassica napus
atgatattttgtctatttactaataattcaaacatcatcattacgtcaggactttttatatatatttcaggaaaaggtgaaacgttagcatgctcgccacagttaaatccagaattattctatggagtattaggaggtttgggtcaatttggaataatatcgagagccaggattgttttgaaccatgcacctaaaagggcgaaatggtttaaaatgctgtacagtgatttcacagcttttacaaaggaccaagaaagtttgatatcaatggacaatgacactggaattgactacgtagaaggtcaactattgatgtcaaacggcatcgtcgacacttcctttttcccaccgtctgatcaatctaaagtcgctgatttagtgaaaaaccatagtatcatctatgttctcgaagtagccaagtattatgatgatcccactgttcccaccactggccaggtgattgacaagttaactaaaaccctaagttacctgcccgggtttatatcaatgcacgacgtgctctactttgatttcctgaaccgtgtacaagttgaagaagataaactcagatctctggctttatgggaagttcctcatccatggcttaacctctatgtccctaaaactcagatactagatttccataacggtgttgtaaaagacattcttctcaagcagaactcgacttctggcgttgctctcttctatcccaccaaccggaataaatgggacaatggtatgtcggcgatgataccagatgaagatgttttctatgtcgtgggactactacaggcagctagctcacaaaatgtgcaagaagtggagagtgtaaacgaggcgatcattaggttttgcaaggactcgggtattaagattaagcagtatctaatgcatttcaccagaaaagaagattgggttgaacattttggatctaaatggggtgctttttcgaagaggaaagatctgtttgatcctaagaaactattatctccagggcaagatattttttga

SEQ ID NO: 159 - DNA, 2307 bp, Brassica napus
atgggtcgcgggataggtacgcaaggggttgaagggctttctcagacgtcgtatgtgccaggctttgatccatctcaggacaaaaaagaagaagactggtggactccaatgacttcggtccgaggttcagtggataatccagtaaagaaagaaaagacagagatgaatacagctccaccgccgtcacagtgggagaaatggtgcaaaagaaaaggtcatggacttcagcttagcgattcaccattgccagaagatgcttctccgcaggcgtcactttattatatctccgaagaagtagtaagtgctggaaaatggcttggaaacgaggagatggatgcggttatgtttatatggcgtgtgaacactacattgaatcgttgggcccctcgccgtgttgctttcatgagtgctatgttttgcctccaagtagacgctgcatacaagaagtttttaccaaacaaaaaagcctatcaattgcctgatttccttcttgggtacggcagaggagagcttccatctcatgggcggactgatctatatacatttcttcgtttacaaatttttgtggacacgaacgcaggtaatcactgggttggtgtctgtgtaaacatcattgaaagaaaagtagaagtctttgattgcggtcggggaaagaacagacagtacgttgagaagtttgctgctatcattcctaggattgtgaagtccgttgcaccacaagaaagacagaagcagctactcctctcatcatattctatcgtggatgtgcctatgaaagtagaattagtcaatctaattgtgtattggatgttactgatgaaggacaaaacccacttgttcaaatggactgacaagtcagttgttgaggagattgaagacttccaagacctgtttgacgtgttactcgttgacaattccgagtttcagaaatcagtgagagctggtgaggccatgatgacacgccatgagagtagaattcaagagatggaagatgcaatgtgccattacgaagagaagacctcggaatgcattagggaactaaggggcataaaagctttgtttgtgtgttgtttggtgatgtgtaccaacggagagactatgtgccgagtggcggctcgcggccaaggccactccttaaacggccaagcctccgtatcagaagacaaagagtatgctgacgtggcgggcgggacgttatgggtggatgtgcttagagagacggcggagcaaggcgtttcgccggtttcttggacggattatttgcatattagcgtcggaggaacgctgtcgaatgctggaatcggcggtcaaatgtttagaaacggtcctcaaattagtaacgtccttgagttggacgttataactggaaaaggtgaaacgttagcatgctcgccacagttaaatccagaattattctatggagtattaggaggtttgggtcaatttggaataataacgagagccagaattgttttgaaccatgcacctagaagggcgaaatggtttaaaatgctgtacagtgatttcacagcttttacaaaggaccaagaaagtttgatatcaatgaacaatgacactggagttgactacgtagaaggtcaactattgatgtcaaacggcatcgtcgacacttcctttttcccaccgtctgatcaatctaaagtcgctgatttagtgaaaaaccatagtatcatctatgttctcgaagtagccaagtattatgatgatcccactgttcccaccactggcctggtgattgacaagttaactaaaaccctaagttacctgcccgggtttatatcaatgcacgacgtgccctactttgattttctgaaccgtgtacaagttgaagaagataaactcagatctttggctttatgggaagtccctcatccatggcttaacctctatgtccctaaaactcagatactagatttccataacggtgttgtaaaagacattcttctcaagcagaactcgacttctggcgttgctctcttctatcccacaaaccggaataaatgggacaatcgtatgtcagcgatgataccagatgaaaatgttttctatgtcgtgggactactacagtcagctagctcacaaaatgtgcaagaagtggagagtgtaaacgaggcgatcattaggttttgcaaggactcggatattaagattaaacagtatctaatgcatttcaccagaaaagaagattgggttggacattttggatctaaatggggtgctttttcgaagaggaaagatctgtttgatccaaagaaactattatctccagggcaagatattttttga

SEQ ID NO: 160 - DNA, 1579 bp, Brassica napus
ccacctattattgcatgagtaactaacaaattaatattatactatataatagtgataatcaatccattccttacaaattttcttcttcatcttccgttacgagagagtaaaagaagaagagaaaatggctaatattcctctaatgatcactctaacgacggttctgatttatttacttccaagctgtatcaaatcgtcagagattattctacccaaatcgttaaacctcaccctcctaaccgatccttccgccatctccgtcgcctctcacgattttggaaacatcactaccgtgatacccggtggcgtgatctgcccttcctctcccgctgagatatcccgtctcctcagctacgcctctaacggagaaagaaagttccaagtggcagctcgcggccaaggccactccttaatgggccaagcaggcgtccccgacggatatgctgacgtggccggtgggacgttatgggttgacgtgctgaaaaagacagcggagaaaggcgtttcgccggtttcttggacggattatttgcatgttagcgtcggaggaacactgtcaaatgctggaatcggcggtgaagtctttagaaacggtcctcagattagtaacgtccttgagttggacgttataactgggaaaggtgaaatgttagcatgctcgccacagttaaactcagagttgttctatggagttttaggaggtttgggacaatttggaataatcacgagagccagaattgttttgaaccatgcacctaaaagggcgaaatggtttcgaatgctgtacagtgacttcacagcttttacaaaggaccaagaacgtttgatatcaatggccaatgatactggagttgactatttagaaggtcaactattcatgtcaaacggcgtggtagacacctctttttttccacagtctgatcaatctaaaatcgctgatttagtgaagagccacggtatcatatatgttcttgaagtagccaagttttatgatgatcctacacttcccatcattggccaggtggttgacatgttaactaaaaccctaagttacctgcccgggttcatatccatgcacgacgtggcctacttcgatttcttgaaccgtgtaaaagccgaagaagataaactgagatctttgggtctatgggaagttcctcatccatggcttaacctctatgtccctaagtctcagatactcgatttccataacggtgttgtcaaagacattcttcttaagcagaactcgacctctggccttactctcctgtatccatcaaaccgaaacaaatgggacaatcgtatgtcggcgatggtaacagatgaagaagatgttgtctatataatcggaatactacaatcagctactccacagaatgtgccagaagtagaaagcttaaacgacagtataattagggtttgcaaggactctggcattaagattaagcagtacctgatgcattacaccagaaaagaagattgggttgagcattttggaacaaagtggagtgctttttcgaagaggaaagatctgtttgatcccaagaaacttctatctccaggacaagatatcttttga

SEQ ID NO: 161 - DNA, 1551 bp, Brassica napus
atgactactaatcccagtttaagcatcatcgcactaatgacgctcttgatgtgtctaactccaaccttaatcaaatcacaggagggcattgatgtccttttacccataacactcaacctcaccgtcctcaccgatcccttctccatctccgccgcttctcgcgacttcggaaatatcaccgatgttaaccccggcgccgtcctctgcccttctacccccgctgaggtcgcccacttctcttatgacagcgagtcaacaacctcctcgccaggtttcaaggtggccgctcgcggccaaggccactccctccgcggccaagcctctgcacctggcggcgttgtcgtgaacatgacgtgtctcgccaagacggctacacccgcagcggttgttgtctcagccgatgggacttacgctgacgtagctgccggcgcgatgtgggtggaggttcttgaggcggcgttggcgagaggcgtctcgccggttactttcacagattatctgtatctcagcgttggcgggacgttgtcgaacgctggaatcggcggtcaggtgtttagacacggcccgcagattagtaacgttcacgagttggatgttattactggaaaaggtgacatggtgacttgctctccaaagttaaaccctgaattgttctatggagttttaggaggattgggacaatttggcataataacaagagccagaattgcgttggatcatgcaccaacaagggtgaagtggctacgcatactctacagtgacttctcggcatttacaagagaccaagagcgtttaatatcaatggccaatgatcttcgagttgactttttggaaggtcaactaatgatgtcaaacggaatagttgacacctcttttttcccactctccgatcaaacaagagtcgcctctcttgtgaatgagcaccgtatcatctatgttctcgaagtagccaagtattatgataccaccacccttcctatcattgaccaggtaatcgacacgttaactagaactctaggtttcacttcggagttcatgttcatgcaagatgttccttattttgatttcttgaatcgtgtccgaaacgaagaagataagctcagatctatagggctatgggaagttcctcacccatggcttaatatgttcgtcccgaaatctcgtgtattagattttcatgaaggtgtcatcaaaggccttcttctcaaccagaccgcaacttctggtgttactctcttctatcctacaaaccgaaacaaatggaacaacctcatgtccgccatgataccaaatgaggatgttttttatgtggtcggattcttgcaatcagcgggtggatcacataactttgaagaactcgagagtcttaacgacaggataatcaacttttgcaataactcaggcattaagatcaaagaatatttgatgcattacacaaaaaaagaagattggattaagcattttggaccaaaatggagtgatttctcgaggaggaaaatgatgtttgatccagaaaaactattgtctccgggacaagacatctttaattag

SEQ ID NO: 162 - DNA, 1551 bp, Brassica napus
atgactactaatcccagtttaagcatcatcacactaatgacgctcttgatgtgtctaactccgaccttaatcaaatcagaggagagcattgatgtccttttacccatatcactcaacctcaccgtcctcaccgatcccttctccatctccgccgcttctcgcgacttcggaaatatcaccgatgttaaccccggcgccgtcctctgcccttctacccccgctgaggttgcccacttctcttatgacagcgagtcaacaacctcctcgccaggtttcaaggtggccgctcgcggccaaggccactctctccgtggccaagcctctgcacctggcggcgttgtcgtaaacatgacgtgtctcgccaagacggctaaaccagcagcggttgttgtcttagctgatgggacttacgctgacgtagctgccggggcgatgtgggtggaggttcttgaggcggcgttggcgagaggggtctcgccggttactttcacggattatctctatctcagcgttggcgggactttgtcgaacgctggaatcggtggccaggtgtttagacacggccctcagattagtaacgttcatgaactggacgttattactggaaagggtgacatggtgacttgctctccaaagttaaaccctgaactgttctatggagttttaggaggattgggccaatttggcataataacaagagccagaattgcgttggagcatgcaccaacaagggcgaaatggatacgcatactctacagtgacttctcggcatttacaagagaccaagagcgtttaatatcaatggccaatgatcttcgagttgactttttagaaggtcaactaatgatgtcaaacggaatagttgacacctcttttttcccactctccgatcaaacaagagtcgtctctcttgtgaatgaccaccgtatcatctatgttctcgaagtagccaagtattatgataccaccacccttcctatcattgagcaggtaatcgacaggttaaccagaactctaggtattacttcggagttcatgttcgtgcaagatgttccttatttcgatttcttgaatcgtgtacgaaacgaagaagataagctcagatctatagggctatgggaagttcctcatccatggcttaatatgttcgttccgagatctcgaatattagattttcatgaaggtgtcatcaaaggccttcttctcaatcagaccgcaacttctggtgttactctcttctatcccacaaaccgaaaaaaatggaacaacctcatgtcggcaatgataccaaacgaggatgttttttatgtgatcggattcttgcaatcagctggtggatcacataactttgaagaactcgagaatcttaacgacaggataatcaacttttgcgataactcgggaattaagatcaaagaatatttgatgcactacacaagaaaagaagattggattaagcattttggaccaaaatggaatgatttctcgaggaggaaaatgatgtttgatccagaaaaactattgtctccgggacaagacatctttagttaa

SEQ ID NO: 163 - DNA, 1632 bp, Brassica napus
atgatgggacctcattcgcagctcacggttgcagcgagaggccgtggacattcactccaaggccaagcacagactagacatggaattgttatccacatggaatcactacagccccagaagctgaaggtccacggcgttggtggtggtactactccgtttgttgacgtgtctggtggtgagctttggataaacattttgcacgagaccctaaagtacgggcttgcaccaaaatcatggacggactacctacatttaactgtaggtggtactctgtccaatgctggaatcagcggccaggcattccgacacgggccgcagatcagcaatgttcatcaactggaggttgttgcaggaaaaggtgagattttaaactgttcagagaggcagaacagcgacctgttccatggagttcttggtgggttaggtcagtttggcatcataacacgggcaagaatagcattggaaccagcaccaaccatggtcaaatggatgagagtgttgtacctggattttgcagcttttgcgagggaccaagagcgcctgatttcgtcagatgatgacaaattcgattacattgaaggttttgtgataataaataggacgggactgctggacagctggaggttatccttcacaccagaagaccctatagaggccagcaaattcaaatctgatggtaggaatctctactgtctggaagtggccaagtactttaagcttgatcaagacaagaaagatgtaatgaaccaggaggtgaaagaatcattgtctgaactaaactacatctcgtcgacactgttttcatcggaggtaacgtaccaagaattcttggacagggtacatgtctctgagatgaagctgcgatcgaaagggcagtgggaagttccacatccatggctgaatctgctagtgccaagaagcagagtcaatgaatttgcaaaaggtgtgttcggaaacatcctaacggatacaagcaacggcccagtcatcgtctacccagtcaacaagtcaaagtgggacaatagaagttcagcggtgacaccggaggaggaagagatattctacttggtggcgatccttacatcggctgttccagggtcgacagggaaagatggagtcgaccaaatcgtaaagcggaaccaaaggatacttgaattcagtgaagcagcaggtttagggctgaagcaatacctgccccattacacaaccagacacgagtggagatcccactttggtcctaagtgggatgattttgtgcggagaaaatccagatatgatcccttcgcaatgcttgcgccaggccagagaattttcgagaaatcaccagtagtctcaccacactcctcatgaccagacccgacccggtggattattattactagggtcttgtatgtaacaaacaactatattttaaggcctaatagatcttatgtacatacgactatattttctcgatcgctgtatacatacacgtgcataatagtattcccctctgtccgtaatcgctgtaattaacacccacttctcggccgaaacgaaagacggagaagtcacacacaactccttctctcatgtttgtcgtttctgttgggctctaattatgttgatcttaaggcttaatagaccatgaaa

SEQ ID NO: 164 - DNA, 1602 bp, Brassica napus
atgaagtatctacatgcatgcttcctcaggaaaagaaacatgattatagtaagaagtttcaccatcttactactactcagctgcatagcctttaagttagcttgctgcttctctagcagcatctcttcgttgaaagcccttcccctagtaggccacttggagttcgaacatgtccatcccgcctccaaagattttggaaaccggtaccagctgcttcctttggcggtcttgcatcccaaatccgtaagcgacatcgcctcggtgatacgacacatatggatgatggggcctcattcacagctcacggtggcagcgagaggccgtggacattcactccaaggccaagcacagactagacatggaattgttatccacatggaatcactacagcctcagaagctgcaggtccacggcgtgggtggtggtcctactccgttcgttgatgtgtctggtggtgagctgtggataaacattttgcacgagaccctaaagtacgggcttgcaccaaaatcatggacggactacctacatttaactgttggtggtactctgtccaatgctggaatcagcggccaggcattccgacaagggccgcagatcagcaatgttcatcaactggaggttgttgcaggaaaaggtgagattttaaactgttcagagagacagaacagcgacctgtttcatggagttcttggtgggttaggtcagtttggcatcataacaagggcaagaatagcattggaaccagcaccaaccatggtcaaatggatgagagtgttgtacctggattttgcagcttttgcgagggaccaagagcgcctgatttcgtcagatgatgacaaattcgattacatcgaaggttttgtgataataaacaggacgggactcctggacagctggaggttatccttcacaccagaagaccctgtagaggccagccaattcaaatctgatggtaggaatctctactgtctggaagtggccaagtactttaagctggatgaagacaggaaagatgtaatgaaccaggaagtgaaggaatcattatctgaactaagctacatctcgtcgacactattttcatcggaggtaacgtaccaagaattcttggacagggtacatgtctctgagatgaagctgcggtcgaaagggcagtgggaagttccacatccatggctgaatctgctagtgccaaggagcagagtcaatgaatttgctaaaggtgtgttcggaaacatcctaaccgatacaagcaacgggccagtcatagtctacccagtcaacaagtcaaagtgggacaatagaagttcagcggtgacaccggaggaggaagagatattctacttggtggcgatccttacatcggctgttccggggtcgacggggaaagatggagtcgaccaaattgtaaagcggaaccaaaggatacttgaattcagtgaagcagcaggtttagggctgaagcaatacctgccccattacacaaccagacacgagtggagatcccactttggtcctaagtgggatgattttgtgcggagaaaatccagatatgatcccttcgcaatgctcgcgccaggccagagaattttcgagaaatga

SEQ ID NO: 165 - DNA, 2439 bp, Brassica napus
agaagctcgacgaccaaacttccgaagacttagaagataattaatcctctgtaatctcgtatccaaagctcttcgatcaacgatcccttactcctcctcctccctctttcgtgatcctcatcaagaaaaaaatcgtttttttttataattattttgggtttatgcgtttgaacaaaaaaaaaaagatttgacttttttttgaaagagcctagtaatgaagcgcattctgggttgattccttttgagtagaagacattgattttgtcaaagttatttaccttcttgtttttctttttaaaaaaaagaagaaattccttttctttttttccctttactcctttctctatcctattctgtaaagattcttagattctcctccaaagttttgaagctaaaggggtttctttttaagattccccttgttgtctgcagtttcgtgattcgatcgtttcttgtatcctcaaatagcggagaagtaatcgtgtttttagattctttttgggggtttcgtagaagcaagcatactgagatcttcatctcttccaggattttctcaaggtaagacttctttttttttaagactaatctatagctcaaattactttatagttccatgcttaattggtaatttgtctggagattgcgcgaactcgttgccctaatttggtttcaggtttttaatcatttgtttgtagtttcaaaaaaggctgttttttaatgtgtcttttttgatgtttggagtttgaattaaattaaagtttttatttgctgaatcagagatcctacattgaactatgagcagatagagttattaggaagaagagaggttactatgggttggtttaacaagatcttcaaaggctctacccaaaggttccggcttgggaatgaccatgaccacaatggctattaccagagttatccacatgatgagcctagtgctgatactgatcctgatcctgatcctgatcctgatgaaactcatactcaggaaccatctacctctgaggaggatacatccggccaggaaaacgaagacatagatcgtgcaatcgcattgtctcttatagaaaacagtcaaggacagactaataatacatgcgctgggaagtacgcaatggtggatgaagatgagcaacttgctagagccatacaagagagcatggtagttgggaatacaccgcgtcagaagcatggaagtggaaatgtatatgccaatggagatatttattatccaagacctactgctttcccaatggatttcaggatttgtgctggctgcaatatggagattggacatggaagatatctgaattgcttgaatgcactatggcatccagaatgttttcgatgttatggctgtaggcatcccatctctgagtacgagttctcaacgtctgggaactacccttttcacaaagcttgttatagggagagataccatccaaaatgtgatgtctgcagcctctttattccaacaaaccatgctggtcttattgaatatagggcacatcctttttgggtccagaagtattgcccttctcacgaacacgatgctaccccaagatgttgcagttgcgaaagaatggagccacgcaatacaggatatgttgaacttaacgatggacggaaactttgccttgaatgtctggactcagcggtgatggacacttttcaatgccaacctctgtatctgcagatacaagaattctacgaaggtcttttcatgaaggttgagcaggacgttccacttcttttagttgagaggcaagcactcaacgaagccagagaaggtgaaaagaatggtcactatcacatgccagagacaagaggactctgcctttcagaagaacaaactgttagcactgtaagaaagagatcgaagcatggcacaggaaactgggctgggaatatgattacagagccttacaagttaacacgtcaatgcgaggtcactgccattctcatcttgtttgggctccctaggctactcaccggttcgattctagctcatgagatgatgcacgcgtggatgcggctcaagggattccggacgctgagccaagacgttgaagaaggaatatgtcaagtgatggctcataagtggttggaagcagagttagctgctggttcaagaaacagcaatgttgcgtcatcttcatcttctagaggagtgaagaagggaccaagatcgcagtacgagaggaagcttggtgagtttttcaagcaccaaatcgagtctgatgcttctccggtttatggagacgggttcagggctgggaggttagcggttaacaagtatggtttgccaaaaacacttgagcatatacagatgaccggtagattcccggtttaagaactcaaaagtcttttgcttttcgactgtggtacccttttttatttataggatcatcataattcttatgtgattgaattata

SEQ ID NO: 166 - DNA, 1553 bp, Brassica napus
attagtgttttgttaaataaagattctctctttaatggtgaagattgttttaaagcatgtatctttagattagtctctccattgtgattttgtagaaaggaactgtttttttatagtctctgcccttagagtaggagaaagattagaacattttgtgagagagatgggtaataagctggtggggaggaagaggcaagtggtggaagaaagatacacaaagccacaaggcttgtatgtgaacacagatgtcgacattaagaaacttaggaaactcattgttgagtctaagcttgctccttgctatcctggagacgacgagagctgccacgagctcgaggaatgccccatttgcttcctgtactatcctagcctcaatagatcaagatgttgcatgaaaagcatttgtacagagtgttttttgcaaatgaagaatcctaactcagctcggcctactcagtgccctttttgtaaaacaccaaactatgctgttgagtaccgtggagtaaagaccaaggaggagaagggcatggaacaagttgaagagcaaagggtaatagaagcgaaaataaggatgaggcagaaagaaatggaggatgatgaagagaaaatgcagaaacgtatggaatcatcctgttcctctagcacaagcgcagtgactggtgaaatggaatacggttctgctgcttcagcaatatcttataatgatcccatggaagacgctgaaacttcttcatcacagaacgtctcagttgctagacagcgctcccgccgccctcgaggaaacagggatgatgaggttgaggctgatcttgaagagttaatggtcatggaggcaatatggctctccatgcaggaaacagggacgcagagagattcaggtggtggagaagtgacaccttttaggcagtatgtatcagaagaagatcatagttatgcagaaccagcaacgccgtcttcatcatctggtggacttccttgtgcaatctctgcacttgctgaacaacgccagcaaatggttggtgaatcctccaatcacaatcacaatcacaacgtcaacgtttcttcgtacagtatgcttcctggcaactgcgacagttactacgacatagaacaagagacagatgacattgaccaccaccatcatcatcatcatcatcagcagcataattattaccatggcaacaccgagatgggagaaacggggagcagctcttcttacatgaacggcagcgagagcttccacaattttcctcttccaccacctcctcctctggtgattgctccagagagttttgaggagcagatgatgatggctatggctgtgtctttggcggaggttcatgccacgaccaccacaagtgcaccaactgaagttacttggcaataagtaagtaggggcttagtagtaatggaaactcaatgcgtgtattttcacttcattcatataaatgtttgttcctataggaaagaaggaaaaaaaaacacagtaattttcagatttaatagaaaagagttgggaactcatgtgtgttgtttggtcatagacaagtagt

SEQ ID NO: 167 - DNA, 1800 bp, Brassica napus
gtagaagcaaactctgaaacacctctctctctctctagctctttctttggtttctctctcttagttagactacaaccttgaggagaatcagaccagagagaggattgaagtttgaaacttcaaacatcaaaaacaagaaagaaaaggtttagaacaaaaaaaaatgtgggatctaaacgactcaccacaccaaacagtcagacaagaagaatctgaagagttttgttattcttcaccgggtaaacgggtcggatctttctcaaactcaagttcatctgctgtagtcatcgaagatggatccgatgacgatgaacctaaccgggtcagacccaacaaccctcttatcacccatcagttcttcccggagatggaatctagcgtcggagacaacggtggtggtggtaccgggccgggctttcctcggtctcactggtttggtgtacagttttctcagtcggatctagctaccggatcatcggtaggtaaacccgcaactgttggagcggtggtggaaccgacacagccgttaaaaaagagccggcgtggcccaaggtcaaggagttctcagtatagaggcgttacgttttaccggcgaaccggaagatgggagtctcatatttgggactgtggcaaacaggtttacttaggtggatttgacactgctcatgcagctgctcgagcatatgatagagctgctattaaattccgtggggtagaagctgatatcaattttaacatcgaagattatgataatgacatgaagcagatgacgaatttaacgaaggaagagttcgtgcacgtacttcgccgacaaagcacagggttccctcgaggaagttcgaagtatagaggtgtcactttgcataagtgtggtcgctgggaagctcgaatgggccaattcttaggcaaaaagtatgtttatttgggtttgttcgacaccgaggttgaggctgctagagcttatgataaagctgcaatcaaatgtaatggcaaagatgctgtgactaactttgattcaagcatatacgacgaagaactgaatgccgagtcatcagggaatcctattcaacaggatcataacctcgatttgagtttgggaaactcggttaattcgaagcataagggtcaagatatgcggctcaagatgaaccaacaagattccctccactctaatgagattctcggattaggtcaaaccggaatggttaactatatccccaattctgttcaccaatttccgggcagcagtaacattcaccgcggaggaggattctcgctgtttccggtgaccgagaaccaccagtttgaaggtcggaccaccgcgaaccaagtgttggcaaatgctgcagcatcatcaggattctctcctcataatcacaatcagatttttaattctactcctacttctcatcagaattggctgcagaccaatggcttccaacctcctctcatgagaccttgaatctttaacttacaagaaacaatttcagggtaaaatgtacctttaaagtctcatatgttcttggtcattaaattaattatcggcttttcgtttgttcatttctctttcaacgtcttgttatattaggctaagaaaatttctcaggaacttaaatcgaattaatttttcctcgatctggtaatatgtattacataagttcacataatgcttggatatatgggaattggataattgtgttattttagatgttctgactaaaaagattgaaaagagttttgtcaatgagttgtcttttgttgtttcttctcgatacttttattaaaagaatttaaaacgtt

SEQ ID NO: 168 - DNA, 1611 bp, Brassica napus
atgggatcaactttcctcagaatctttatgatcttggttctgagttgcataccaggtagaaccaatctttgttccaatccttctgttagtaccccaaaagatttacctccttcagttattcgttcctcattagattctctcgacttggaaggttacatcaccttccatgacgtccacaatgcgtccaaggactttggcaacagataccacttaccacctctggcgattctccatccgagatcagcttctgatatttcaacagtgatgaggcatatagtacgctccacatcaaatcttacagtagcagccagaggccatggtcactcgcttcaaggacaagctctagctcatcaaggtgttgtcatcaacatggagtcacttcttccaagtcatgatatcaagatttacaaagggaaacaaccttatgtagatgtctcaggtggtgagttatggattgatattctacgtgagactctaagatacggtctttcaccaaagtcttggacagactatcttcatttaactgttggaggtactctatcaaacgctggaatcagtggtcaagcgtttaagcatggacctcaaatcaacaacgtttatcagctagagattgtcacagggaaaggagaagtagtgacctgttctgagaagcgaaactctgaacttttccagagtgttcttggtgggcttggacagtttgggataatcacccgggcaaggatctctcttggaccagcaccgcttatggttaaatggatcagaacactctactcagacttctctgcattttcaagagaccaagaacatttgatttcaaaaaagaatgctttcgactacgtggaaggatttgtgataatcaacagaacagacatcctcaacaactggagatcttcattcactcccaacgactccacagaggcaagccaattcaagtcagatggaaaaactctgtattgcctagaagtggtgaaatatttcaactcagaagaagctcactctatgaatcaggaaatggagaagttactttcagagttgagttatattcaatccactttgttctcatctgaagtgccatatatcgagtttttagaccgcgtgcacattgctgagatcaaactgagagaaaagggtttatgggaggttccacatccctggctgaatctcctaattcccaaaagccgcattttcgaatttgctacaaaagtattcaacaacattgtgactagcaaccacaatggacctacccttatttatccagtcaatcaatctaaatggaacaaacatacgtctttgatcactcctaatgaagatatcttctacctcgtggcctttctcccatctgcaatcccaaaaccctcaggggaaagtgatttagagtaccttttaagacaaaaccaaagagtgcttagcttctgtgcagaagctaacttggatgtgaagcagtatttgcctcactacgaaactcaaaaagagtggagatcacactttggaaacagatgggaaacgtttgcaaagaggaaacacaagtacgatcctctggcggttctagcacctggtcagagaattttccaaagggtgtcgtcacaagtatcttccatccaacttctctaa

SEQ ID NO: 169 - DNA, 3137 bp, Brassica napus
actcactctactctgtaaatatacaacacacacaaacatcaaaacttcaacaacaaccaaagccttctttcattattttgccgatccatgtccgatcaactccaactgcatgatcgattacttggcacaacgctaagccgtatcttctttctttgccgcaacaaacctccacgtaccggcaacaagtactcatcctttttcgttgatggcatatgtctcatccacgtgtcttggctcttcttcttcggatttgatttcgcatattccggttcaaggttgtcttcttcttcatcttcatcaacgagtgagccaccacgatgatgcaatcacgaacgactcacctttttctgagtaaattggcgcagtgctcaagcgacaaggattcttcttgctcaagctcgctcttagataaactaaaatagactgagtttcgtcaagtctttccaacatttttttcaccaatttaacaatataaaccgatatataaaccaattttggttcaattcaaaaatcgttaataagagacaaaattaaaccaagtaacttgagttccgaactgaaacatagtttggttcagtcagtgacacttttccaaaaccctaaacccgtaaaaaccgaatgccccagtgaagcacctaaatacgaaggcctttgacaaagaccagagagaaagggatggttcatgtccttgattcaccgccgtttgaatcgttttggctcttgacatatacgattacaagacacaacacaaagtcaacattatatatgcacattatctttcttgtaagtaccacagttgtattgatttttttcagtttatgtctctttgaactgtccttatgtagataattctgcgcaaatagcacatatcacctactcgtgaaggaaaatcatgacaaggacctacttggtatgtcatgtaccaccaatagaacataataagaatcttttcttttcttttgataaaatttattagaatcttttatatgcccactttataatatgtcattctggaacctgtggcaacaaaagatacacgtgaatagtatcggtcacgctgtgattggaacatttatatggcaacaaattattattttctccaaagaatctggaaaattaattcttggccacatcatgtgtttcagacagctttccatccatcctgcaaagaataatagccaatgatgatgtgtggtcctaagagggtgtgacgtagttccaagcttaatagtcaaactcaaatgctgcaagaaactgacaagataaactgatgcaacaatggtcaagactctctttcctcaacctgagctcaagtaccatgagacacaagtaagggccctactgtactatacatgctctaacagtaagtagatcttaagtaacaacaagagacaaaacaaagtaatggcaagtaaccagaacacaagttatatgactgtaccgcccaaaacctttcctataagttcccttctctactaagtttacctctacttccttcctctcagtcttttcaatatctctcaagaaagtaaaaaatgagattgacctcatccttacggttccacagacaaaacaacaagactttcctcagaatcttcatgatcttggttcttagttgtataccaggtagaaccaatctttgttccaatcattcagatactcgttcctcattagattcactcgatttagagggttacataacctttgatgatgtccacaatgcgtccaaggactttggcaacagataccagttcccacctttggcaattctccatcccaagtcagtttctgatatctcaacagtgctgagacatatcttacacctgggatccacctcaaatattacagtagcagccagaggccatggtcactcgcttcaaggacaagcgctagctcatcaaggtgttgtcatcaacatggagtcacttccaagtcctgatatcaagatatacaaagggacacaaccgtatgttgatgtctcaggtggtgaactatggatcaacattctacgggagactcttaaacacggtctatcaccaaagtcctggacagactaccttcatctgactgttggaggtactctatctaacgctggaatcagtggtcaagcgtttaagcatggaccacaaatcaacaatgtctaccagctagagattgtcacaggcaaaggagaagctgtgacctgttctaagaagctgaatcctgagcttttccacagtgttcttggagggcttggacagtttggcataatcacacgggcacggatctctcttggaccagcaccacatatggttaaatggatcagggtactctattcagacttctctacattttcaagggaccaagaacacctgatttcgaaaaagaaaggttttgacttcgtggaaggatctgtgacaatcaatagaacagatcttctcaataactggaggtcatcattcactcccaatgactccacagaggcaagccagtttaaatctgatggtaaaactctgtattgtttagaagtggtgaaatatttcaacaaggaagaagctaactccatgaaccaggaaatagatagtttactttcagagttgagctatataccatctactttgttctcatctgttgtgccatacatagagtttctggaccgtgtgcatcttggggagataaaacttagagctaagggtttatgggaggttccacatccctggctgaatcttcttgttcccaagagcagcatatttgaatttgctacagaagtttttaacaacattctcacaagcaacaacaatggacctatccttatttatccagttaaccaatctaaatggaacaaacgtacatctttgatcactcctagtgaagatatattctacctcgtggcctttctcccctctgcagtgcaaaatgatctagagcaccttttgagacaaaaccaaagagtgcttaacttctgtgcagaggcaaagatggatgtgaagcagtatttgcctcactacgagactcaaagagagtggagatcacactttgggaacaaatgggaaacatttgcaaagatgaaacatgagtatgaccctctagcgattctagcacctggtcacagaatcttccaaaaggcaacacagttatatcctattcaacttcaataa

SEQ ID NO: 170 - DNA, 1791 bp, Brassica napus
atgagattgacctcatccttacggttccacagacaaaacaacaagactttcctcggaatcttcatgatcttggttcttagttgtataccaggtagaaccaatctttgttccaatcattcagatactcgttcctcattagattcactcgatttagagggttacataacctttgatgatgtccacaatgcgtccaaggactttggcaacagataccagttcccacctttggcaattctccatcccaagtcagtttctgatatctcaacagtggtgagacatatcttacacctgggatccacctcaaatcttacagtagcagccagaggccatggtcactcgcttcaaggacaagctctagctcatcaaggggttgtcatcaacatggagtcgcttcaaaatcctgatatcaagatttatagagagaaacaaccgtatgtagatgtctcaggtggtgaactatggatcaacattctaaaggagactctaaaacacggtctttcgccaaagtcatggacagactaccttcatctgactgttggaggtactctatctaacgctggaatcagtggccaagcgtttaagcatggaccgcaaatcaataatgtctaccaactagagattgtcacaggcaaaggagaagttgtgacctgttctgagaagctgaatcctgaacttttccacagtgttcttggggggcttggacagtttggcattatcacacgggcacggatctctcttggaccagcaccacatatggttaaatggatcagggtactctattcaaacttctctacgttttcaagggaccaagaacacttaatttctaaaatgaaaggtttcgactacgtggaaggttttgtgtcaataaatagaacagatcttctcaataactggaggtcatcatttagtcccaatgactccacagaggcaagccagtttaagtctgatggtaaaactctgtattgtctagaagcggtgaaatatttcaacaaggaagaaactaactctatgaatcaggaaactgagaagttactttcagagttgagctatataccatctactttgttctcatctgtcgtgccatacatagagtttctggaccgtgtgcatcatggggagataaaactgagagctaagggtttatgggaggttccacatccctggctgaatctcctggttcccaagagcagcataattgaattttctacagaagtttttaacaacattctcacaagcaacaacaatggacctatccttatttatccagttaatcaatccaaatggaacaagcaaacatctttgatcactcctagtgaagatatcttctacctcgtggcctttctcccctctgcagtgcaaaatgatttagagcaccttttgagacaaaaccaaagagtgcttaacttctgtgcagaggcaaagatggatgtgaagcagtatttgcctcactacgagactcaaagagagtggagatcacactttgggaacagatgggaaacatttgcaaagatgaaacatgagtatgaccctctagcgattctagcacctggtcacagaatcttccaaaaggcaacacaactgtatcctattcaacttcaatcagaggcaaagatggatgtgaagcagtatttgcctcactacgagactcaaagagagtggagatcacactttgggaacagatgggaaacatttgcaaagatgaaacatgagtatgaccctctagcgattctagcacctggtcacagaatcttccaaaaggcaacacaactgtatcctattcaacttcaataa

SEQ ID NO: 171 - DNA, 1641 bp, Brassica napus
atgggtttaacctcatccttacggttccatagaagaaacaacaagactttcctcagaatcttcatgatcttggttctaagctgtataccaggtagaaccaatctttgttccaatccttctcttaatactctttcctcattagattctctcgacttggaaggttacatcaccttccatgacgtccacaatgcgtccaaggactttggcaatagataccacttaccacctctggcgattctccatccaaagtcagtttctgatatttcaacagtgatgaggcatatagtacgctccacatcaaatcttacagtagcagccagaggccatggccactctcttcaaggacaagctctagctcatcaaggtgttgtcatcaacatggagtcgcttcgaagtcatgatatcaagatttacaaagggaaacaaccttatgtagatgtctcaggtggtgagttatggattaatattctacgtgagactttaaaatacggtctttcaccaaagtcttggacagactatcttcatttaactgttggaggtactctatcaaacgctggaatcagtggtcaagcgtttaagcatggacctcaaatcaacaacgtttatcagttagagattgtcacagggaaaggagaagtagtgacctgttctgagaagcgaaactctgaacttttccagagtgttcttggtgggcttggacagtttgggataatcacccgggcaaggatctctcttggaccagcaccgcttatggttaaatggatcagggcactctactcagacttctctgcattttcaagggaccaagaacatctgatttcaaaggagaatgctttcgactacgtggaaggatttgtgatcatcaatagaacagacatcctcaacaactggagatcatcattcactcccaacgactccacggaggcaaaccagttcaagtcagatggtaaaactctgtattgcctagaagtagtgaaatatttcaactcaaaagaagcaaactccatgaatcaggaaactgagaaggtactttcagagttgagctatattccatccactttgttctcatctgaagtaccatatatcgagtttttagaccgcgtgcacattgctgagatcaaactgagagctaagggtttatgggaggttccacatccctggctgaatctcctgattcccaaaagcagcatatctgactttgctacaaaagttttcaacagcattgtgactagcaaccacaacggacctatccttatttatccagtcaatcaatctaaatggaacaaacatacgtctttgatcactccaaacgaagatatcttctacctggtggcctttctcccctctgcaatcccaaaaccctcaggggcaaatgatttggagtaccttttgagacaaaaccaaagagttcttagcttctgtgcagaagctaacttggatgtgaagcagtatttgcctctctatgaaactcaaaaagagtggagatcacactttggaaacagatgggaaacgtttgcaaagaggaaatataagtacgatcctctggcgattctagcgcctggtcagagagttttccaaagggtgtcgtcacaagcaagtgttccccttgtaacggcttcagctaggcagctaagagagtga

SEQ ID NO: 172 - DNA, 1638 bp, Brassica napus
atgggattgacctcatccttaagaagaaataacaagagtttcctcagaatcttcatgatcttggttctaagctgtataccaggtagaaccaatctttgttccaatcattctgttaccaccccaatagatttacctccagatattcgttcctcattagactcactagatttggagggctacataagcttcaatgatgtccacaacgcgtccaaggactttggcaacagataccagttaccacctctggcaattctccatccaaggtcagtttctgatatctcaacaatggtgaggcatattgtacatcttggctccacctcaaatcttacagtagcagccagaggccatggtcactcgcttcaaggacaatctttagctcatcaaggtgttgtcatcaacatggagtcacttagaagtcctgatatcaagattcacaaggggaaacagccgtatgttgatgtctcaggtggtgaatcatggatcaatattctaagggagacactaaaatacggtctttcaccaaagtcatggactgactaccttcatctcactgttggaggtactctatctaacgctggaatcagtggtcaagccttcaagtatggaccccaaatcaacaacgtttaccagctagaaatcatcacagggaaaggagaagtcatgacatgttctgagaagcaaaactctgaacttttctacagtgttcttggagggcttggacagtttggcataatcaccagggcaaggatagctcttggaccagcaccacatatggtgaaatggatcagggtactctactcagacttctctgcgttttcaagggaccaagaacatttgattaccaagaagaatggtttcgactatgttgaagggtttgtgacagtgaatcgaactgacctcctcgataactggaggtcatcatttagtcccaatgattccataggagcaagccagttcaagtcagaagggaaaactctgtactgtctagaagttgtgaaatatttcaagttagaagaagctaactctactaatctggaagtggagaagttactttcagagctgagttatattccatctactttgttctcatctgaagtgacatacattgaatttctggaccgtgtgcatatcgccgagataaaacttagagcaaaggggttatgggaggttccgcatccctggctgaatctcctgattcccaagagcagcatttttgaatttgccacagaagttttcaacaacattctcacaagcaacaacaacggtcctatccttatctatccagtcaatcaatctaaatggaacaaacatttatctttgatcactccagatgaagatatcttctacctcgtggcctttctaccctctgcagtgccaaatcctaactcagggacaagtaacttagagtaccttttgagacaaaaccaaagagtgcttaacttctgcgcagcagcaaacatcaacgtgaagcagtacttgccccattacgagactcaaagagagtggagatcacactttggaaacagatgggaaacgtttgcaaagaggaaacatacgtatgaccctctggcaattctagcacctggtcacagaattttccaaaaggcaacacagttatctcccatccaacttctctaa

SEQ ID NO: 173 - DNA, 1599 bp, Brassica napus
atgggattgacctcatccttaagaagaaataacaagagtttcctcagaatcttcatgatcttggttctaagctgtataccaggtagaaccaatctttgttccaatcattctgttaccaccccaatagatttacctccagatattcgttcctcattagactcactagatttggaggggtacataagcttcaatgatgtccacaacgcgtccaaggactttggcaacagataccagttaccacctctggcaattctccatccaaggtcagtttctgatatctcaacaatggtgaggcgtatagtacatcttggctccacctcaaatcttacagtagcagccagaggccatggtcactcccttcaaggacaagctttagctcatcaaggtgttgtcatcaacatggagtcacttagaagtcctgatatcaagattcacaaggggaaacagccgtatgttgatgtctcaggtggtgaatcatggatcaacattctaagggagacactaaaatacggtctttcaccaaagtcatggactgactaccttcatctcactgttggaggtactctatctaacgctggaatcagtggtcaagccttcaagtatggaccccaaattaacaacgtctgccagctagaaatcgtcacagggaaaggagaagtcatgacatgttctgagaagcaaaactctgaacttttctacagtgttcttggagggcttggacagtttggcataatcaccagggcaaggatagctcttggaccagcaccacatatggtgaagtggatcagggtactctattcagacttctctgccttttcaagagaccaagaacatttaattaccaagaagaatggttttgactatgttgaagggtttgtgacagtgaatcgaactgacctactcgataactggaggtcatcatttagtcccaatgattccataggagcaagccagttcaagtcagaaggaaaaactctttattgtctagaaattgtgaaatacttcaacacagaagaagttaactctgtgcctcaggaacggtttcccctgcaggaaactgagaagttactttcagagttgagttatattccatctactttgttctcatctgaagtgccctacattgagtttctggaccgtgtgcatatagctgagataaaactgagagcaaaggggttatgggaggttccacatccctggctgaatctcctgattcccaagagcagcatttttgaatttgccacagaagttttcaacaacattctcacaagcaacaacaacggtcctatccttatctatccagtgaatcaatctaaatggaataagcatacatctttgataactccagatgaagatatcttctacctctaccttttgagacaaaaccaaagagtgcttaacttctgctcagcaacaaacatcaacgtgaagcagtacttgccccattacgagacacaaagagagtggagatcacactttggaaacagatgggaaacgtttgcaaagaggaaacatacgtatgaccctctggcaattctagcacctggtcacagaattttccaaaaggcaacacagttatctcccatccaacttttctaa

SEQ ID NO: 174 - DNA, 1734 bp, Brassica napus
atggcaagtaataattttccatcccaaagtcatcttctagtaataataatatttatcacaactcttttaactccgatcacaaccaacacatcaccacaaccatggaatatcctttccaacgacaacttcgccggaaaactcacctccgcatcctcctccgtcgaagcagcttccatcgatttcggccacgtcaccaaaattctaccctccgccgtcttaaacccttcctccgtccaagacatcatcgatctcataaaactttctttcgactctcaatcctctttccctatagccgctcgtggccacggacacagcttccgtggccaagccgctgctaaagacggagtcgtggtcaacatgcggtcaatggtaaacgaggaccgaggcataaaggtgtctaggaccggtttatatgcggacgtggacactgcgtggctatggattgaggtgttgaataaaacgttggagttggggctaacgccggtttcttggacggactatttgtatttaacggtcggtggaacgttatccaacggcggaataagcggacaaacgtctcggtacggtccacagatcagtaatgttcttgagctggatattattactggaaaaggggagattgcaacttgttccaacgacatgaactcagatcttttctacgcggcgttaggaggtttgggtcaattcggaattataacaagagccaggattaaactcgaattagctccaaaaagggctaaatggttaaggtttctatacactgatttctctgaattcacaagagatcaagaacgattgatatcagaagcgggcggtttacatttcttggaaggttccgttatgcttgaccatggcccacctgataactggagatctacttactatccaccgtccgatcacttgaggatcgtctcaatgataaaacgacaccgtgtcatctactgtctcgaagtcgtcaagtattacgacgaattttctcaacactcagtcaacgaggaaatggaggagttaagcgagagtttaaactttgtaagagggtttgtgtacgagaaagatgtgacgtatatagatttcttgaaccgggttcgaacgggagagctaaacctgaaatccaaaggccaatgggatgttccacatccatggcttaatctctttgtaccaaaatctcagatttcaagatttgattatggtgtctttaagggtattatccttagaaataacatcactaccggtccacttcttgtttatcccatgaagcgcattatgtggaatgatcaaatgtccaccgctatacccgaagaagatgtattttatgcggtagggttcttacgatctgccgagtttgataattgggaggcttatgataaagaaaatatggaggtattgatgttttgtgaggatgctaaaatggatgtcatacagtatcttccttatcatgcatcacaagaaggatgggttagacattttggtccgaggtggaatacttttgtagagagaaaatataaatacgatcctaaaatgatattgtctccaggacaaaatatatttcaataaataaacttgtgttaggcaataattaagttaattgttagtcgttgtcgttctcactttatgtgtttggccacgcttttcattgattctgattactatatttactttagactattgaaaattccacttgaataaatcataagaaataatctaaagtttggtgggagatttttggtgataagg

SEQ ID NO: 175 - DNA, 1437 bp, Brassica napus
atggtgagctataattttccatcacaaattcatcttctaatgataacgatattagttatcatcacaactcttttaactccgatcacaaccaacacatcatcactaccgtggaatatcctttccaatgacaacttcgccggaaaactcactaccgcatcatcctccgtcgaatcagctgccactgatttcggccacatcaccaaaatctttccctccgccgtcttaaacccttcctccgtccaagacatcaccgatcttataaaactttctttcgattctcaatcctcttttcctctagccgctcgtggccacggacacagccaccgtggtcaagccgcggctaaagacggagtcgtggtcaacatgcggtcaatggtaaacagggaccgaggcatcaaggtgtctaggaccggtttatatgctgacgtggacagcgcgtggctatggatcgaggtgttgaataaaacgttggagttagggctgacgccggtttcttggacggattatttgtatttaacggtcggtggaacgttatctaacggcggtataagcggacaaacgtttcggtatggtccacagatcagtaatgttttagagatggatgttattactggaaaaggagagattgcaacttgttccaaagacatgaactcagatcttttctatgccgcgttaggaggtttaggtcaattcggaattataacgagagcaagaatcaaactcgaattagctccgaaaaaggctaaatggttaaggtttctatacactgatttctctgagtttacaagagatcaagaacgattgatatcagaaacgaacgggccacatttcctggaaggttctgttatgttagaccatggcccacctgataactggcggtccacttactatccaccgtccgagcacatgaggatcgtctcaatggtcaaacaacatcgtgtcatctactgccttgaagtcgtcaagtattacgacgaaacttcccaacactcagtcaacgaggaaatggaggagttaagcgacagtttaaactatgaacgagggtttgtgtacgagaaagatgtgacgtatatggatttcttaaaccgggttcgaaccggagagctaaaactgaaatccaaaggcaagtgggatgttccacatccatggcttaatcttttcgtaccaaaatctcagatttcaagattcgagtatggcgtttttaagggtattatccttagaaataacatcactaccggtccccttcttgtttatcccatgaaccgcaacaagtggaatgatcgaatgtcgaccgttatacccgaggaagatgtattttatgctgtaggatttttaagatcggcgagttttgacaattgggatgattatgaaaaagaaaacatggaactttttccaccagaatatgattctactaaatcgcgtttctctgcgttgtaa

SEQ ID NO: 176 - DNA, 1437 bp, Brassica napus
atggtgagctataattttccatcacaaattcatcttctaatgataacgatattagtaatcatcacaactcttttcactccgatcacaaccaacacatcatcactaccgtggaatatcctttccaatgacaacttcgccggaaaactcactaccgcatcatcctccgtcgaatcagctgccactgatttcggccacatcaccaaaatctttccctccgccgtcttaaacccttcctccgtccaagacatcaccgatcttataaaactttctttcgattctcaatcttcttttcctctagccgctcgtggccacggacacagccaccgtggtcaagccgcggctaaagacggagtcgtggtcaacatgcggtcaatggtaaacagggaccgaggcatcaaggtgtctaggacaggtttatatgctgacgtggacagcgcgtggctatggatcgaggtgttgaataaaacgttggagttagggctgacgccggtttcttggacggattatttgcatttaacggtcggtggaacgttatctaacggcggtataagcggacaaacttttcggtatggtccacagatcagtaatgttttagagatggatgttattactggaaaaggagagattgcaacttgttccaaagacatgaactcagatcttttctatgccgcgttaggaggtttaggtcaattcggaattataacgagagcaagaatcaaactcgaattagctccgaaaaatgctaaatggttaaggtttctatacactgatttctctgagtttacaagagatcaagaacgattgatatcagaaacgaacgggctacatttcctggaaggttctgttatgttagaccatggcccacctgataactggcggtccacttactatccaccgtccgagcacatgaggatcgtctcaatggtcaaacaacatcgtgtcatctactgccttgaagtcgtcaagtattacgacgaaacttcccaacactcagtcaacgaggaaatggaggagttaagcgacagtttaaactatgaacgagggtttgtgtacgagaaagatgtgacgtatatggatttcttaaaccgggttcgaaccggagagctaaaactgaaatccaaaggccagtgggatgttccacatccatggcttaatcttttcgtaccaaaatctcagatttcaagattcgagtatggcgtttttaagggtattatccttagaaataacatcactactggtccccttcttgtttatcccatgaaccgcaacaagtggaatgatcgaatgtcgaccgttttacctgaggaagacgtattttatgctgtcgggtttttacgatcggcgagttttgacaattgggatgattatgaaaaagaaaacatggaactttttccaccagaatatgattctactaaatcccgtttctctgcgttgtaa

SEQ ID NO: 177 - DNA, 1737 bp, Brassica napus
atggcaagtaataattttccatcacaaagtcatcttctagtaataataatatttatcacaactcttttaactccgatcacaaccaacaacacatcaccacaaccatggaatatcctttccaacgacaacttcgccggaaaactgacctccgcatcctcctccgtcgaagcagctgccatcgatttcggccacgtcaccaaaattctaccctcagccgtcttaaacccttcctccgtccaagacatcatcgatctcataaaactttctttcgactctcaatcctctttccctatagccgctcgtggccacggacacagcttccgtggccaagccgctgctaaagacggagtcgtggtcaacatgcggtcaatggtaaacgaggaccgaggcataaaggtgtctaggaccggtttatatgcggatgtggacactgcatggctatggattgaggtgttgaataaaacgttggagttggggttaacgcctgtttcttggacggactatttgtatttaacgatcggtggaacgttatccaacggcggaataagcggacaaacgtctcggtacggtccacagatcagtaatgttctagagctggatgttattactggaaaaggggagattgcaacttgttccaacgacacgaactcagatcttttctacgcggcgttaggaggtttgggtcaattcggaattataacaagagccaggattaaactcgaattagctccaaaaagggctaaatggttaaggtttctatacactgatttctctgaattcacaagagatcaagaacgattgatatcagaaacggacggtttacatttcttggaaggttccgttatgcttgaccatggcccacctgataactggagatctacttactatccaccgtccgatcacttgaggatcgtctcaatgatcaaacgataccgtgtcatctactgtctcgaagtcgccaagtattacgacgaaacttctcaacactcagtcaacgaggaaattgagaagttaagcgagagtttgaactatgtaagagggtttgtgtacgagaaagatgtgacgtatatagatttcttgaaccgggttcgaacgggagagctaaacctgaaatccaaaggccaatgggatgttccacatccatggcttaatctctttgtaccaaaatctcagatttcaagatttgattatggtgtctttaagggtattatccttagaaataacatcactaccggtccacttcttgtttatcccatgaagcgcattatgtggaatgatcaaatgtctaccgctatacccgaagaagatgtattttatgcggtagggttcttacgatctgccgagtttgacaattgggaggcttatgataaagaaaatatggaggtattaaagttttgtgaggatgctaaaatggatgtcatacagtatcttccttatcatgcatcacaagaaggatgggttagacattttggtccgatgtggaatacttttgtagagagaaaatatagatacgatcctaaaatgatattgtctccaggacaaaatatatttcgataaataaacttgtgttaggcaataattatgttaattgttagtcgttgtcgttctcactttatgtgtttggccacgcttttcattgattctgattgctatatttactttagactattggaagttccacttgaataaatcataagaaataatctaaagtttggtgggagatttttggtgataagg

SEQ ID NO: 178 - DNA, 2058 bp, Brassica napus
cgaaaaagagagagaatctgtgcatgttgctcagaaaatcttcaaagtgtaatctgggcttacgttagctctcacgaactcccaaggatctcctatatatgtttttccatttccccataaaatctctcatcatctaaaacatctttattatcatttcttcttctatatatatattcctttcccctttagtgtcctgagagacgcatatcttgatttcttgattcttgatgactcctgaaatgacgtcaagctttcttctcatgacattcgcgatttgtacactgatcatagccgttggtcccagcgagctcctccgcatcggagccatagacgtcgacggccacttcaccttcaagccttccgacttagcctccgtctcgtcggacttcggtatgctaaagtcgccggaggagccattagccgtacttcatccatcctcagctgaagacgtggcacggctcatcagaacagcttacggctcagccacggcctttccggtctcagcccgtggccacggccattccataaacggacaggcttcgacagggaggaacggtgtggtggtggagatgagccaccgcaacatagggacgccggagccactagttgaacccgaggaaatgtatgtggacgtttggggtggagagttatgggttgatgtgttgaaaaaaacgttggagcatggcttagcaccaaagtcatggactgattacttgtatctttccgttggtggtacactctctaatgcaggaattagtggtcaagcttttcaccatggtcctcaaattagtaacgtccttgagctagacgttgtaactgggagaggagaggtgatgagatgttcagaagaagagaacacaaggttattccatggagttcttggtgggttaggtcaatttgggatcattacacgagcacgaatctctctcgaacctgctccccaaagggtaagatggataagagtgttgtattcgagcttcgaagtgtttacagaggaccaagaatacttaatatctatgcatggtcaatcaaagtttgattacgtggaagggtttgtgatcgtggacgaaggtctcgtcaacaactggagatcatctttcttctctcctcgtaaccccgttaaaatttcttccgttagctctaacggctccgttctgtattgccttgagatcaccaagaactaccacgagtccgagtccgacaccgtcgatcaggaagtagagattttgatgaagaaattaaattttataccgacatcggtattcacgacggatttgcaatatgtggatttcttggaccgggttcacaaggcggagctgaagctccggtcgaagaatttatgggaggttccacacccatggctcaacctattcgtaccaaaatcgagaatctctgattttgacaaaggcgttttcaagggcattttagggaataaaactagtggccctatccttatctacccaatgaacaaagacaaatgggacgaaagaagctcggccgttacaccggacgaggaagttttctacctcgtggctttactgagatcagctttatcggacggtgaagaaacgcagaagctagagtatttgaaagatcagaaccgtcggatcttggagttctgtgaacaagccaagatcaatgtgaagcagtaccttcctcaccatgcaacgcaagaggagtgggtggctcattatggagacaaatgggatcagtttagaagcatgaaggctgagttcgatccacggcatatactcgctaccggtcagaaaatctttcagaacccatctctggctttgtttcgtccatcgtcgtcttcgtcgtcagcttcatggtgacaggacaaaatcagagggggaaagtagtagttgagattatattcttcctgatgtatatatatgacctaatagagaagcatcagagagagattaggttggggtattttgttagcaacgtttaaaaattagagttaggaagattcaagttagtaatatgttactgtttaaattttctacatcatcacggattttgatatggttttagggaagctttaaacccgat

SEQ ID NO: 179 - DNA, 1608 bp, Brassica napus
atgactcgtgaaatgacgtcaagctttcttctcgtgacattcgcgatttgtacactgatcatagccgttggtcccagcgagctcctccgcatcggagccatagacgtcgacggccacttcaccttcaagccttccgacttagcctccgtctcgtcggacttcggtatgctaaagtcgccggaggagccattagccgtacttcatccatcctcagctgaagacgtggcacggctcatcagaacagcttacggctcagccacggcctttccggtctcagcccgtggccacggccattccataaacggacaggcttcgacagggaggaacggtgtggtggtggagatgagccaccgcaacatagggacgctggagccactagttgaaccggaggaaatgtatgtggacgtttggggtggagagttatgggttgatgtgttgaaaaaaacgttggagcatggcttagcaccaaagtcatggactgattacctgtatctttccgttggtggtacactctccaatgcaggaattagtggtcaagcttttcaccatggtcctcaaattagtaacgtccttgagctagacgttgtaactgggagaggagaggtgatgagatgttcagaagaagagaacacaaggcttttccatggagttcttggtgggttaggtcaatttgggatcattacacgagcacgaatctctctcgaacctgctccccaaagggtaagatggataagagtgttgtattcgagcttcgaagtgtttacagatgaccaagaatacttaatatctatgcatggtcattcaaagtttgattacgtggaagggtttgtgatcgtggacgaaggtctcgtcaacaactggagatcctctttcttctctcctcataaccccgttaaaatttcttccgttagctctaacggctccgttctgtattgccttgagatcaccaagaactaccacgagtccgagtccgacaccgtcgatcaggaagtagagattttgatgaagaaattaaattttataccgacatcggtattcacgacagatttgcaatatgtggatttcctggaccgggttcacaaggcggagctgaagctccggtcgaagaatttatgggaggttccacacccatggctcaacctattcgtaccaaaatcaagaatctctgattttgacaaaggcgttttcaagggcattttggggaataaaactagtggccctatccttatctacccaatgaacaaagacaaatgggacgaaagaagctcggccgttacaccggacgaggaagttttctacctggtggctctattgagatcagctttatcggatggtgaggaaacgcagaagctagagtatttgaaagatcagaaccgtcggatcttggagttctgtgaacaagccaagatcaatgtgaagcagtaccttcctcaccatgcaacgcaagaggagtgggtggatcattatggagacagatgggatcagtttagaagcatgaagactgagttcgatccacggcatatactcgctaccggtcagaaaatctttcagaacccatctctggctttgtttcctccatcgccgtcttcatcgtcagcttcatggtga

SEQ ID NO: 180 - DNA, 1819 bp, Brassica napus
gctaaactcagtcgctatttatagctaacccacaagcttctctcaccacagacaaacaaaaaaaggtttggttccaattccaaaaactaaaagctttccatatacgaatagcaattcacacatacacacaatgatagcttacatagagccatacttcttggataacgacgccgacgccgcctccgtcaccggacaatcttttgatggcgtctccgagtcactccacatccagggagaaatcttatgcggcggtgctgcaacggatatcgccgggaaagacttcggtggcatgaactgcgtgaagcctcttgcggtggtgagacccgtgggaccggaggatatcgccggagcggtgagagcagctctgaggtccgataaactcacggtggcggcgcgtggaaacggccattctatcaacggccaggccatggcggaaagagggcttgtcctagacatgcgttccacggcggagaatcattttgaggttggttatttacccggcggggcgtttgtcgacgtctccggaggggcattatgggaaaacgtgttgaaacggtgcgtttcggagtatggcttggcgcctaggtcgtggactgattacctcgggttgacggtaggcgggacgttgtcgaatgccggcgttggtggacaagcgttccgttacgggccacagacgtcaaatgtaacggagttagacgttgtgacgggaaatggagacgtcgttacttgctcggaggtggagaactctgagctcttcttctctgtcttaggtggtcttggccagttcggtatcatcactagagctagggttttgctacagccagcacctgatatggtgaggtggataagaatcgtatacaccgagttcgacgagttcactcgggacgccgagtggctagtgagtcagaaggacgagtcatcgtttgattacgtggagggatttgtgtttgtcaacggtgatgaccctgtcaacggatggcctacagttccactccacccagaccacgactttgacccgacccaactcccacaatcatccgggtcggttctttactgccttgaactagctctccactaccgagattccgactccaactcaaccgtcgacaagagagtggagagattgatcggacggctgagatttgttgagggactgaggttcgaggtggatttgccttacgttgactttttactgagggtaaaacgagctgaggagatcgcgaaggtgaacggcacgtgggaaacgccgcacccttggcttaacctcttcgtgtcgaaacgtgacatcggggaatttgatcggacggttttcaaggaacttgccaagaacggagtcggagggcccatgttggtctatccactcttgcgaagcaggtgggatgaccgtgcatccgtggttttacctgaaggagagatattctacattgtggcattgcttcgattcgtgccgacgtgtgctaaaacttcgtcgttcgagaaaatggtggctcaaaaccaggagattgttcaatggtgtgtcagaaagggaatagatttcaagctatatcttcctcactacaagtctcgagaggaatggattcgtcattttgggaaccgatggtcgaggttcgttgacaggaaaactatgtatgatcccatggctatcctttcaccgggtcaaaagattttcaatagggctccttgacctcctattgtacttttgtattcgtaagttacgttggtctaatgtaatttttatatatttcttttctttgtaattttacttttttcccaataaaatcagctgttttttttatttattaaaattaaaaggtggtct

SEQ ID NO: 181 - DNA, 1871 bp, Brassica napus
gctgaactcagtggctatttatagctaagccactgcttctctcaccacagacaaacaaaaaaaagagtttagttccaaaagcttccacctacgatagagtcactcgaatagctaatcacacaacaacacacaagaatgatagcttacatagagccatacttcttggacaacgagtccgacgctgcctccgtcctgaacgtcaccggcaaatcttccgacggtgtttctgagtcactcaacatccaaggggaaatcttatgcggcggcgctgcggccgatatcgccgggaaggactttggtggcatgaactgtgtgaagcctcttgccgtagtgagaccgctaggaccggaagatatcgccggagcggtgagagcagctctgagttccgataaactcacggtggcggcccgtggaaacggccattcgatcaacggccagtccatggcggaaggagggcttgtcgtcgatatgcggtccacggcggagaatcatttcgaggttggtttcttggccggtgacggtggtggtggtacggcgtttgtcgatgtctcgggaggggcattatgggaaaatgtgttgaaacggtgcgtttcggagtacggtttggcgccgaggtcgtggactgattacctcgggttgacggtaggcgggacgttgtctaatgccggcgttagtggacaagcgttccgttacggaccacagacgtcaaatgtaacggagttagacgtggtaacgggaaatggagacgtcgttacttgctcggagatggagaactcggagctcttcttctctgttctaggtggtcttggccaattcggtatcatcaccagagctagggttttgcttcagcaagcaccagatatggtgaggtggataagaatagtgtacgccgagttcgacgagtttactcgggacgctgagtggctggtgagtcagaaggacgagtcttcgtttgattacgtggagggattcgtgttcgtcaacggagatgacccggtcaacggctggcctacagttccactccacccagaccaagactttgacccgacccgactcccacagtcttccgggtcggttctttactgcctggagctggctcttcactacagagattctgactccaactcaagcgtcgacaagagagtggagagattgatcggacggctgagatttgacgacgggttgaggttcgaggtggatctgccttacgttgactttttactgagagtaaaacggtccgaggagatcgcaaaagtgaacggcacgtgggaaacgccgcacccttggcttaacctcttcgtgtcgaagcgtgacatcggagatttcgaacagaaggtcttcaaggagcttgtcaaaaatggagtcggtgggcctatgctggtctacccactattgcgaagcaggtgggatgaccgtacttccgtggttttaccggaaggagagatattctacattgtggcattgcttcggttcgtgcctcccggtgctaaagcttcatcggtcgataagttggtggctcaaaatcaagagattgttcaatggtgtgtcaaaaatggaatagatttcaaactgtatcttccacattacaagtctcgagaggagtggattcgtcactttggaaaccaatggtcgagattcgttgataggaaagctatgtttgatcccatggctatcctttcaccgggtcaaaaggttttcaatagggctctttgaccccctaattttcgtttttacttcggtattcttgagttttgtgggtttaatgtaatttttatgtaattctttttttccaattggcctttgcgtctcgtccaattatggagttcacttcaaaagaaaaacgtccttttttgttcaatataaatttttcc

SEQ ID NO: 182 - DNA, 1921 bp, Brassica napus
tctctctctctctctgcactgtctccgtgaaaacccatttactgatccaatggctttagcttctttgttcgctcgctctcgtagaacagcttccaccttctttctccgctcttcacgtcagctccactcgacgccgaataaaaacggtgacgtgtcctcgatctctgcacagaagggtcgccggaggatttggtggtccagctctcttgtcccgttggcgataggtgctgcctccgcagcctctttcgcggttctgagccagtcgtatccttctatcagccaatcatcagctttggattctaaaggtgtaaaggttggggggaaaggaagtactgagcttgtggttaaaggagagtacaaagaggttcctaaggagcttgttgctgagttgaaaacaatcctccaggataacttgacaacggactatgatgagaggtacttccatggcaagccgcagaacagttttcataagtcagtaaacattcctgatgttgttgttttcccgaggtccgaagaagaagtctccaagattcttaaatcctgcaacaaatataaggttcctattgtaccatatggtggtgcaacatcgattgagggtcacaccttggctccaaaaggaggtgtgtgcattgacatgtcactaatgaagagggtgaaagcattacatgtggaagatatggacgttgtagttgagcctggaatcggttggcaggagctcaatgaacagttagaacaacacggactattctttcctcttgatccagggccgggtgcaaccataggaggcatgtgtgctacacgttgctctggatctttagctgtaaggtatggaactatgcgtgacaatgtcataagccttaaggtggttcttcctaatggagatgttgtgaagacagcttctcgtgctagaaagagtgctgctgggtacgatttgacccgcttgatcattggaagtgaggggactttgggagtcatcactgaggttactcttcggcttcagaaaatcccacagcattcagtggtggcagtgtgcaattttcctacggttaaggatgctgcagacgtggcgattgctactatgatgtctggaatacaggtgtcaagagtggagctccttgacgaggttctaatcagggctcttaatatggctaatggaaaaaacttgaaggaagttccaactctgatgtttgaatttatagggacagaggcatatgcacgtgagcagactcaaatcgttcaggagattgcttctaaacacaatggatcagactttgtgttcgcagaagaatctgaagccaaaaaggaactctggaaaataagaaaagaggcgctttgggcttgctatgcgatggcgccaggtcatgaagcaatgactacagatgtatgtgtccctttatctcacctgggagaactaatatcaagatccaagaaagagcttgatgcatcacctttgttatgtgccgtcattgcgcatgctggagatgggaactttcatacatgtattatgtttgatcctaacaatgaagagcagcgaaaagaggcagaaagattgaacaaccttatggtccacagtgcactgtccatggacggaacatgtactggagagcacggtattggaacaggaaaaatgaagtatctggagaaggaacatggaatagaagcactacaaactatgaagaaaatcaagagagcgttggacccaaacgatatcatgaatccagcaaagctaattcctcctcatgtgtgctactaaaaaaaggccttggtcaaaacgattatgttgtcactgatgtttggttacacttgtgggtaataataacaagagggaagagatgttgtttgtagtatacattgtatctttggtcttatactgtttttatttggtctataaacacccaaagtttttatctaagtacaaaaa

SEQ ID NO: 183 - DNA, 1807 bp, Brassica napus
aacaaaaaaaagagtttagttccaaaagcttccacctacgatagagtcactcgaatagctaatcacacaacaacacacaagcactcctacttacatagagccatacttcttggacaacgagtccgacgctgcctccgtcctgaacgtcaccggcaaatcttccgacggtgtttctgagtcactcaacatccaaggggaaatcttatgcggcggcgctgcggccgatatcgccgggaaggactttggtggcatgaactgtgtgaagcctcttgccgtggtcagaccggtaggatcggaggatatcgccggagcagtgagagcagctctgagttccgataaactcacggtggcggcccgtggaaacggccattcgatcaacggccagtccatggcggaaggagggcttgtcgtagatatgcggtcaacggcggagaatcatttcgaggttggacattatggtggtacggcgtttgtcgatgtctccggaggggcattatgggaaaatgtgctgaagcggtgcgtttcggagtacggcttggcgccgaggtcgtggactgattacctcgggttgacggtaggcgggacgttgtctaatgccggcgttagtggacaagcgttccgttacggtccacagacgtcaaatgtaacggagctagacgtggtaacgggaaatggagacgtcgttacttgctcggagatggagaactcagagctcttcttctctgttttaggtggtcttggccagttcggtatcatcaccagagctagggttttgcttcagccagcaccagatatggtgaggtggataagaatagtgtacgccgagttcgacgagtttactcgggacgctgagtggcttgtgagtcagaaggacgagtcttcgtttgattacgtggagggcttcgtgttcgtcaacggagacgacccggtcaacggctggcctacagttccactccacccagaccaagactttgacccgactcgactcccacagtcttccgggtcggttctttactgcctcgaacttgctcttcactatagagactctgactccaactcaagcgtcgacaagagaatggagagattgctcggacggctgagatttgacgaagggttgaggttcgaggtggatctgccttacgttgactttttactgagagtaaaacggtccgaggagatcgcaaaagtgaacggcacgtgggaaacgccgcacccttggcttaacctcttcgtgtcgaagcgtgacatcggagatttcgaacagaaggtcttcaaggagcttgtcaagaatggagtcggtgggcctatgctggtctacccactcttgcgaagcaggtgggatgaccgtacttccgtggttttaccggaaggagagatattctacattgtggcattgcttcggttcgtgcctcccggtgctaaagcttcatcggtcgataagttggtggctcaaaatcaggagattgttcaatggtgtgtcaaaaatggaatagatttcaaactgtatcttcctcattacaagtctcgagaggagtggattcgtcactttggaaaccgatggtcgagattcgttgataggaaagctatgtttgatcccatggccatcctttcaccgggtcaaaaggttttcaatagggctctttgaccccctatttttcgtttttacttcggcattcttgagttttgtgggtttaatgtaatttttatgtaattcttttttccaattggcctttgcgtctcgtccaattatggagttcacttcaaaagaaaaacgtccttttttgttcaatataaaattttccagaca

SEQ ID NO: 184 - DNA, 723 bp, Brassica napus
atgaatggagatagaccagattctcattacacggagacgggattcccgtatgccgctagttacatggacttttatggtggtgcggctcaggatgatcccctaaactatgctcatgccggaacaatgcatcctcctcatcaggacagcctgtactggaccatgaacacaaatgcatacaaatttggattttcaggatcagataatgctgctttctatggttcttatgacctgaacgatcatctatccaggatgtcaattgggagaaccaattgggagtaccaccttcccttggtaaacgttgatgagtcagttccacgctctggggacaccgatgatcactcagacgctgaagaatgcattgcaattgaacatgatcccgagagtcctcaggtatcctggcaagacgacattgatcccgatacaatgacctatgaggaattaatagagctcggggaagcggtaggatcagaaagccgagggctatctcaggaactcattgaaacgcttcccactagaaaatacaagttcgggagcttcttctccaggaaaagagcaggggataggtgtgtgatatgccagctcaagtacaagattggggagaagcagatgaatcttccgtgcaagcacgtgtatcattctgaatgcatatctaagtggctaaacatcaacaagatttgcccggtctgtaacagcgaggtctttggggagcccagcatccattga

SEQ ID NO: 185 - DNA, 867 bp, Brassica napus
tctctctctctctctcggagactttaacgtcacggacacgcaatggtgaagaaaatgcagaaaagctaaagggacggtgggagcttcgtctacgtatatgcagcttcgcagccggagaatcgtatacagatcggaaaaagctagctcgtcgtcgtcgtcttgttgcgcgagtaacaacaatagagttatagatctggaggaggaaagagatggagagactgaaacgtcgtcgtgtcgacggagtagtaagaggaagctatttgaaaaccttagagagaaagaatctatggagaattcacagcaaatcgtagctggttttgattccgccgtgaaagaatcatcggattgttgttgcagccggaaagcatctttgtcaacgacggaggagaaggggaaatcaacggcggagcaaccaccaacggcagtggagattgaagattttttcgtggaagctgagaaacagctccatgataatttcaagaagaagtataactttgatttcgaggaggagaagccattagaaggacgctacgagtgggttaaattatcagagtaatgaagaaaatgatgatggtgatgaagcatacgtttatttaacttttagtatctaattttcagagaataattccaatttatttatttctagaatagaagcttttgtgaggaaagatttgtagcagaatgtttgaaagtacgaatctgcacagaaataaaggctttttggggtttcagaacagattttgttttctgcaaaagtgaaaaaagataaacccagaaaagctgtgtctttttgcttaactctttctcctcttcttcttctctcatgttgtacagttttgttttgttttgtggactatatatttctat

SEQ ID NO: 186 - DNA, 914 bp, Brassica napus
aagaaaccatatgttacaagaagagctagagagagagagagcacgcatgcattactagagagaggtctctagaagaaggtgacttgggagactgatggcggggggaaatgtaagtgtgagaggtaggagaagagaactagatgtgtccgaagaaaatgaagcgaatactacaccgaaacgaaggaagctggaagtagatgtagaatctaggattgtcttttctccgtgtgtacagtcaacgagtcgtggtggaaccgtggtgagaaactcggctggtgcgtcggagacaagcgtcgttattgttcgaaggagagaatctcccgtcgacgaacagtgtcagattcctagctcggtttcttgctgttcaagtaatggatccgaagagaaaacgaaacggaggatagagtttgtagatcttgaggaagatgacgatggtgatcttgatcaaaccgtaacatcgtggatttatgataacttcaacaacacgaggagagatatgcaacacgaggattcgacggctatggaggtccaagaggtcgagtgtcgccgtcggttaaagatgaagaagagccgtgagacggtgaaggaagccgagctggaagatttttttcaggcggcggagaaagatgtcaggaataataagatgttggaatgttcttggaagtataatttcgattttaagaaagatgagccacttggtggacggtacgagtgggtaaagttgaatccatgaagatgaagacgataatcgctcccctttctcttcataataatgtaacttatagaatgtaatgtattaatctttcttacccaaacaatgtaaatatctctcaaataatcagtaacatgtaatccagaaactcctactttcatttgtatgcgtagtagttaattagatccatgttgtttctcgg

SEQ ID NO: 187 - DNA, 1018 bp, Brassica napus
aaaacgctgcagagaaaaccaattccctagacacatttcacatttcactattattttcctccctaaaaaaccttttccattgtcttttttcagtttttcacttttaagattaaaaatcactttcttctcttcctcttcatcgtttccctcctttcactctcaaccagagattccttcgatcatcttcccaaacatgggaagatacataaagaagtcaaagatcgccggcggagcccttcccgcaaaagatatctctcaccaaaccgcttccagttttcgcaccagagccgccaagaacctcgccctgcagcgtctccgatctcattccaccccgccgtgcgtcgacgcagactcatttcgctacctccagctccggagccgccgtctcgttaagcttccgttactcgccgacacaagaaaacaacagcagaaacagcttataaacagtgtcggtaaacgacagacgaccaaccctagagctaactcggtgttgttgtcagagccgacgaatctggaagaagactgtggtagcaacttggtgaactctgggtctggttgtagttttggagagaaaggtctcgagttcgaatctggagacagagaaacgacgccgtgtagcttgaaaagagactcagaagaagctatacaaagtgtgccttctcatgagatcgaagacttctttgcattcgctgagcagcaacaacagagattcttcactgaaaagtacaactttgacatagtgtcggagaatccattgccaggacgttacgaatggatcaaagtggtgccatgaactggtttggctgtaacatgatgttgtaaagttgtgtgatttattaggaagatctgtgttggaacagaggcaatgaaaaattgcacacagactaacaaagactagcctactaaaaaccccaaacacaagggttttttttaaggggcttggggttaacttgttagttaaggtaataataatgtaatgttttttttggatcaatggtaataatgtgtaatgttttaa

SEQ ID NO: 188 - DNA, 531 bp, Brassica napus
atgagcgagagaaatctcaacagcaagcgagaatcgcgagagcttgaagcttcaagcacaagcgtctccccgctccagaagaagaagaagctcgatgattcttcagccgactctaatgccgtcgtcctcgcgattccctctccttccgtagcttcatctcaaggtagatgctctgtcacctctgacgacgatgataaaagctctatcgtcagctccggctgtttcagcagtgaatcgaacgaaaccgtgaggaacaatccaacctctggtgcagatctggaggatacagcgagcgaggctttgggagaaacaacagagacggaaatggaatcatcatcgccggcgttgaagagggataataaaccaccggaggtgagcaagattccgacggcggaggagatcgaagcattcttatcggagctagaaggcggcgaggataaacagaagcgattcatagaaaagtacaacttcgatatcgtcaatgacaaaccgcttcaaggtcgttacatgtgggatcgactcaagccatga

SEQ ID NO: 189 - DNA, 641 bp, Brassica napus
aaccagaaaaacctcataaaacttttacaagtgtccatagagagaaagagagagagagagaagaatgaacgagatgagcgagagagattctaaagagactagctttgaaggatctagcatcaagaggatgagactcgatgatggtgatgactcagctgaagagacaacggtttcttcttcttcttcttcttctctgtcttactccgccgcttcagattctgaagatgaagatcatcggagctcaagcgccatagatacttctctgccatttttagatctcgagggtgagcagcaaatctccgaaaccgaagtatcgtcattaatcaccatcagtttcagcagagcacaaggaagtccatcgagcgaaatggactcggccacgacgaccaagacggagaggcaagagaagaaggcaaaagcaccaccgacgcaggctgagcttgacgacttcttctccgccgcggagagaggccaacagaaacgattctcggacaagtacaactacgatatcgttaatgatacgccgcttgaaggtcgctacgagtgggttagtctcaagccttaagaaggagaagacaatgctaaagttacacgacgtcgttaggcactcttgtgagttttgtcacagagagagagagaga

SEQ ID NO: 190 - DNA, 914 bp, Brassica napus
gaaaaccctctccattgctctctcttccctcctctcgaagtcttttccctcccattctctcttcccgcttccgacctacctccgcctctcgagtgtccgaagatgggaaaatacattaagaaatcaaagattaccggtgacatcgactctatggaagccaccgaagcaacatctttgggtgttcgcaccagagccgccgctaaaaccctagccttgaagaggcttaattcttcctccgcccccgactcttcttgctatcttcagctccggagccgccgtctcgagaaacccccgtcgctggctgaaccgaagcagaccccgagacaggttaaaccgggaattaaagagtctggttcgaagattgactcggttaactcgagcgtagctggttcgggtgatgaatgtttttgtcgagagaacagtcctgagtttcagacaagacaaagcacaagggagagcacgccttgtaactttgttgaggatctggagaccattgttacaccaggttctagcacaaggtcgatgcgtacaccagcgagagatagcacggtcccaaccattggtgaactggaggagttctttgcctatgcagagcagcaacagcagaggctattcatggagaagtacaacttcgatattgtgaatgatgtgccactccctggaggctacgagtgggtacaagtcagtccatgaagttgaaaaggaagcaagcttttgtgatatggtgtgaagtaagaatgtaatgaattagacagattaaccgaacatcaaaatcctttaaacaggagtgtaatcttaaaaagtaataatgtggttagagaacaagttggaaagtagttttagggacatgaacctcataccatttgtactaatctcttttgaggatttagatggttagtgaatttgtttgctca

SEQ ID NO: 191 - DNA, 1170 bp, Brassica napus
atgggaaaatacataaagaagaacaaactcgacggagaagctctatccttgatggacgtctctccttctccttctccactcggcgttctcacccgagccaagtccttagctctccaaaaacccccctcttccccttctcccaaccctccgccgtcgaaacagaagatgactgattgttccggcggctcgtatctccagctacggagccgccggctccagaagaagcctcctccgattgtcgtgattcgctcaagtaaacggagaaagcaacagcagcagcggagggaggaagagggtcgaaaccctaaccctaatccccaaaattcgattcgtgggtccggtggtgatgggtcgtcgaggtcggattcggttgcggagagtgtcgtgtttggtaaagagaaggactttaacggtggaatcaacagagagctcgatggcagtgaaagcttcaacaggaccacaagtagggaatccacaccatgcagtttgatacaaaagccagaatccatcccaagtcctggatcatctacgaagcttagcaacggtattagtggcaacagcaaccaaagagaagatagtttttcagggagccatcgtcacctaccaactacacctgaaatggacgagtttttctctggtgctgaagaagaacaacaaaagcaattcattgaaaagtacaactttgatcccgtgaacgaacaaccactaccaggacggtttgaatggaagaaggtagatgattagaaaacaacgagaaagggtgggggtggttaatagttaataacagactattattaacattattcctgctaattatcggtttgatcttttattatccatcatccgttttctttaactttcccaacatgtaaaggaaacttgggattaaaaaaaccattgtagcgttggtgtctgtaaacataagtgtctgaaaagggtttgtgtaacacataactgataccaatccttttcagttctaaacagatcaccttactattagtagtattactaaactataagagaaaagtctgtaagggtttaggggtttagagttcttttggttaatggtttagtggaagtcttgttataactctgtgtcctgtaaccataataaaaatctatctatttatgtttatacatgtactgatctcaaaatctctttcaataaag

SEQ ID NO: 192 - DNA, 975 bp, Brassica napus
atggcgttattgtctaaaccgaacgaaaaaacagaatccgggttttctccaattccggttatagatatctccgacccagagtccaaacacgccctcgtcaaagcctgtgaagactttgggttcttcaaggtgatcaaccatggcgtttcctcggagctagtctctgtcttggaacacgaggccgttgagttcttctcgttgcccgcgtccgacaaaacccaagtcgctggttatccctttggatacgggaacagggagattggtcggaatggtgacgttggttgggttgagtacttgttgatgaatgctaatcttgatttcggttcacattcattctttcccggtctctttaataacccagaaactttcagaaatgcattgttagaatacacaacatcagtgaggaagatgacaagccatgttttggagatgataactgatgggttaggaatcgaaccgaggaacacccttagcaagcttgtctctgataaaaacactgactctatattcaggcttaatcactatccaccatgccctcatcatatcaacaccaatactaataccaatggtggcaacaatgtgatcggttttggcgaacacactgatcctcagatcatctctgtcttaaggtctaacaacacttctggtctccaaatcaatctagctgacggctcctggatttctgtcccttcagatccttcctcattcttcttcaacgtcggcgactctctccaggtattgacaaatgggaagttcaaaagcgtgaagcatagggttttagcgaacagcaggaaatctagagtttctatgatttactttgctggaccttctttgactcagagaatcgctcccttgagttgtcttactgacaatgaagatgagagtttgtacaaagagttcacttggtctgaatataagaactatgcctatcactctagattatctgataataggcttcaaccatttgaaaggtaa

SEQ ID NO: 193 - DNA, 1233 bp, Brassica napus
atggtggttctatcacagcacgttgctttagataaccacttatccgtaatcccaacatacaaaccggttccggtccccgtcgtggacctaaccgacccagaagccaaaactctaatcgtgaaagcctgtgaagagtttggtttcttcaaggttgtaaaccacggagtccgaccagacctcatgacccggttagagcaggaggctgtcggcttcttcgccttgccacagtctcttaaaaaccaggccggtccgcctgaaccctacggttatggtagtaaacggattggaccaaacggggacgtgggatggatagagtatatcctcctcaatgctaaccctcagctcacgtctcccaaaacctccgccattttccgtcaaaccccacaaattttccgagaggcggtggaggagtacatgaaggaggtgaagaaagtcacgtgcaaagtgttggagatggtgacggaaggattaggaatagagccaagggacacactgagtaagatggtgagagatgagaagagtgactcttgcttgagaatgaaccattatcctacggcggaggaagaggtggagaagatggtgaaagtagggtttggggaacacacagacccacaaatcatctcagtgctacggtccaataacactgcgggtcttcaaatctgtatgaaagatggaagttgggtcgctgtccctcctgatcactcttctttcttcatcaatgttggagatgctcttcaggttatgacaaatgggaggttcaagagtgtaaaacacagagtcttagctgatacaaggagatcgagagtctctatgatatattttggaggacccccattgagccagaagattgctccattgccatgtcttgtccctaagcaagaggattggctttataaagaattcacttggtctcaatacaaatcttcagcatacaaatctaaacttggtgattataggctcggtctctttgagaaacaacctcttctcacccataggtcaaatgtatgagattagtcatgaactcatgatgatgctttgtatcataaaaatcataattgcgaaagaaggaaattgatagtgtattggagtagctttttatttttggtatgttttttcgttaggcacaaaagcattaggctttgcttagagtttgacccaatcaaacctaccttttgtatcctctcttcttctttgtttgcctttcttggaaataacaattcgtctgttttttct

SEQ ID NO: 194 - DNA, 1020 bp, Brassica napus
atggttgtttcgttaaagccaaagtcagtcactcttaataatagccaagtccatgttaacccaaaatgcaaaccgagtccggttctaatcccggttgtaaatttaaccgatccaaatgccaaaacccaaatcgtaaaggcttgcgaggagttggggttcttcaaagttgtcaaccatggggtcagaccagagtttttgacccagttggaagaagaggccatcaaattctttgctttgccacagtttcataaagacaaggcgggtccagccgacccgtttgggtacggtagtaaacggatcggacctaatggtgatgtaggctggattgagtatattctgctcaatgctaatagtgatactaaaaccaccgccgtgttcctgcaaaccactccaactttcagagaggtggtggtcctggtggaagtgttcatggaggagatgaaggatatgtctagcaaagttcttgatatggtagctgaagagttaaagatagagccaaaggataagctaagcaaactggtgaaggtgaaggagagtgattcgtgtctgaggatgaaccattacccggagaaggaggagactagacgcaaggaagagattgggttcggtgagcatacagatccacagttagtgtcagtgcttaggtcaaacaacacagagggtttacaaatctgtttgaaagatgggacttgggtcgatgttccacctgatcattcctctttcttcgttattgtcggagatactcttcaggtgatgactaatggaagattcaaaagtgtgaaacacagagtgctcacaaatacgaagaggtcaagactatcgatgatctacttcgcaggtcctccattgacagagaagattgcaccattctcatgccttgtcccaaaacaggaggattgtctctatagagagtttacttggtctcagtacaagtcagctgcttacaagactaagcttggcgactataggcttggtctctttgagaaacaatttccattttctttttctggtactgtttga

SEQ ID NO: 195 - DNA, 978 bp, Brassica napus
atggtgaaagggtcccagaaaatcgtggccgcagataaaggcataccaataatagacatgtcgcaggagagatcacgagtgtcgatgcagatagtcaaagcctgcgagactctcggctttttcaaggtggtcaaccacggctttgaccgaaccatcatctcaaggatggagcaagagtccattaacttcttcgctaaatcggttcacgaaaagaaatcggttgaatcggttaaccagccatttcgttatggctttagggacatcggtctcaacggtgactctggtgaggtcgagtacttgctgtttcataccaacgaccccgcttttcgctctaagccatccttccgctcggcagtgaattgttacatagaagcagttaggcagttggctcatgagatattagaactgacggctgagggacttggggtcccacctcacaccttcagtaggttgatcagctccgtcgatagtgactccattttgagggtgaatcactatccaccgtccgatcagtttttcggtggagccacacactctgataaatctgtgtcactgaccagggttggcttcggagaacacaccgacccgcagatcttaacagttcttcgatctaacggtgtaggaggcctccaagtgtccaacccagacggcatgtgggtccctgtcttccctgacccctcagctttctgcgtcaatgtaggagacttgttgcaggtgatgacgaacgggagatttataagtgtaaggcacagagcattgacttacggaaaagaaagcaggctctcgacatcattctttgctggaccgccgctccaagcaaagattgggccactacaggcgatggttacgacagcgaatcaaccacgattataccaaacgtttacttggagcgaatacaaaaaactggcatactctctacgtcttgaagatagtcgcttagacatgtttcgtacaggtaagggtctggaggatccttag

SEQ ID NO: 196 - DNA, 1205 bp, Brassica napus
atggttttaccttcttcaacaccgtttccacccactggaaagaaggcaaaagcctcgccggaatataactttccggttattgatttctctacacatgaccggtcaaaactatcggagaagattgttaaagcatgcgaggttaatggattttttaaggtgataaaccatggagttagaccagagataatctcgagatttgagcatgaaggtgaagagttctttaataaaccagaatctgagaagctacgagccggtccggcgagtccattcggttacggatgcaagaacatcgggttcaatggagatttgggtgagcttgagtatcttcttctccacgcaaacccgacgtctgtcgctgataaatctgaaactatctcgcatgatgatcccttcaagttcagttcggccacgaatgattacatacacgccgttaaagatctagcatgtgagataattgatctgacggcggaaaatttgtggggccagagatctagcgaggtgagtgagcttatcagagacgtccgtagcgactcaatcctgcggctgaatctatatccacctgcaccgtacgcgctaagaggcgttagccaaataggtttcggcgagcattctgaccctcagatcttgacggtgttgagatccaacgacgtagatggacttgagatttgctcacaagacggtttgtgggtaccagtcccatctgaccctacatgcttctacgtattggtcggtgactgccttcaggcattgacgaatgggaggttcactagtgtgaggcacagggtattggcgaacacggcagggaagcctcgaatgtcggcgatgtattttgcggcaccgcctttagaggccaaaatatcaccattgcctgaaatggtatcgccagcaaatccacggcggtataattcattcacatggggtgactataaaaaagctacatactctctccgtttaggtgtccctcgtctcgagtttttcaaaacttcataagtattaataccggataaattttatacttttttttgctgaaatatattagtgtatgattgttggtctgttatacaaaagtagacaccatgtgtatgtacatagttctacaccaaaaatgaaaattaatagtgagatttttggtcgtttaatttacaactgataaatcaatatgcaattgttttttttcttttgtccggtggtagtaattaagtcta

SEQ ID NO: 197 - DNA, 750 bp, Brassica napus
atgtttcgtgaagacaagaaactctttgaccgatcctttaatgagaaagtccgagaaaagttttcggacacatcaaagcattgttaccggtggggaaaccctaacgcaacttccccgactcagtactccttttctgaagcgtttcacatcactcttgctgagatcttaagtttttctgatgatggcaacaacttcagaacaacagttgcaatgtatgtgcaagaggtagctcgagtggcacacatgatatgcgaaatactggggaatcaagtgaaagtgaactcgaagtatttcgagaatatttttgcactacaaaacagctttctaagacttaacaagtatcacccttgtgtttttggttcgcaagtgtttggtttggttcctcataccgatacaagtttcatcaccatactcgctcaagatcaaatcggaggactagaattgaagaaaaatggacaatggattggcgtaaaaccttgctcggaggctcttactgtgaacattggtgacatgtttcaggcactgagtaatggagtgtaccagagcgttagacatagagtgatacctccagcaaacgtggagaggttgtcgatagcattcttcgtatgtccctatcaggaaacagagattgaatgctctgggaatccgaagaagtatagaagattcagtttcagagagtacaaagagcagagtgaacgtgatgttaaagaaactggtgataaggtaggcttgtctaggtttctcatctga

SEQ ID NO: 198 - DNA, 555 bp, Brassica napus
atggaaaaatttgcttcagaatccgaggctctggcatattcattggcagaggtccttgcagagaaatcaggacggaaatcaagtttcttcaaaaaaacctgtgtgcgaaacacatgttatctaaggatgaaccgttatccaccatgtccgaaaccatcggaggtgtatggtttgatgccacacacggacagtgatttcctcacaatcttgtatcaagaccaagtcggaggactccaactcatcaaagacaatagatggatcgccgttaaacctaaccctcgtgctctcattatcaatattggtgacttatttcaggcatggagtaatggcatgtacaaaagtgtggaacatcgtgtgatgacgaatccaacggtggagagattctcaacggcgtattttctatgtccatcatacgacgccgttatagactgttcaggtgattgtcctgcttatagaaatttcagtttcggagaattcagacagcaagttcaagaagatgttaagaagcttggttataaagttggcctccctaggttcattaatgatatctactaa

SEQ ID NO: 199 - DNA, 489 bp, Brassica napus
atggatccaccattcaacaaaacatacaaaacccttttgtataaacagatcaaaaacacagaaaacagtgtcccgcaaacaccttttagcttccatgtcactgctgtcgttgaagaggtggagcttccattgattgacgtcagccgtctgatcaatggagccgagaaggagagggagaagtgtaagcaagacattgctagcgcttctagggagtgggggtttttccaagtgatcaaccatgggatatcaatggatgtgttggagaagatgagacaagagcaaattagggtttttagagaaccatttgacaagaaaatcaagtcggagaagttctccaccgggagttaccggtggggaacgccgtcagccacttgtctacggcagctttcttggtcagaagcatttcatgttcctatgacagatatttctgacaacaaggactttactacgctcaggtacacaaatattgtgttattaattaacttttaa

SEQ ID NO: 200 - DNA, 1611 bp, Glycine max
atggtagctgggaaatacccttcccccacatacttcatcctcctgctcataaccataacacgtttgatctccacagtgggcaagacctcccaatggatgaaggccctaacgccgcctccggaactcgcctcggtctccctcgatgacaccatcttcagcaagctccgcaacgacccagaggccctccaggggagggcctccagggactacgggaacctcgtccgcgaggttccctcggcggtcttccacccgacctcgtcgagcgacatcgcgaggctgatcaagctgtcgtacaacggttctgtccccttcaagatagcggcgagggggcaagggcactcgacgaggggccaggcgatggtacgtgatggggtggtggtggacatggccgggttcagagagagagggaatggagagggaataagggttgtgatgagtgttgttgtggaccctaataataagaatggggaacagttgtggatcgatgtgctaaacgccacgcttgagcatggacttgcacctatgtcctggactgattacttgtacttgacggtgggaggaactctctccaatgctggcatcagtggccagacattccgctatggtcctcaaatcaccactgtccgccaaatggacgtcatcactggaaagggagaatttgtgacttgctctcagcagacgaattcggagttgttccacgcggttctggggggcttaggacaatttggaattataacaagggcaagaatcgctcttgccccagctcccaagagggttaaatgggtgagacttttgtacaatgacttttctgctttcaccaaagaccaggaacaactaatctcaatcactagaaggaaacaaaatattgcactggattatttggaaggattgctgctaatgcaccaaggacccataaataattggagatcttctttcttccctttagccgaccatgcccgaataatttcgctagtaactaaacacagcgtcctctattgcctagaagttgccaaatattatgatggccaaaatgaaaacaatgtggacaaggaactcaaagttttactacaaggactgagctatatccctggattttactatgaaaaagatgtctcgtatgttgagttcttgaatagagttcgaagtggagagttgaagctacaatcacaaggactatgggatgttcctcacccatggcttaatttgtttataccgaaatctcaaatcatggaatttgactcgggcgtgttcaagaatatcatccttaaacgaaacattaccacaggacccgtcttggtttaccccatgaatagaaacaagtgggacaataggatgtcagcatcaatacccgacgaggatatcttctacacagttggatttttgcattcaagtgggtttgataattggaaggcctatgatgctcaaaataaagaaattctacaattttgtaacgattctgggatcaaggttaagcaatatcttccccactaccgcacacaagaagattggacaaaccattttggccctaaatggaggacttttgtagaaagaaaacaccagtttgatccaaaaatgattctatcacctggacaaagaatctttaacaattaa

SEQ ID NO: 201 - DNA, 2110 bp, Glycine max
aacacaccacaactccaaactttttcctcttgttctcttcttcttcaacacaactagtcataatccagctcatctctctctccctctctctttgttctctctttctctttctccaaaatggctctaaactacccttttttaacctacttcatactactgctagtaaccataacccgtttgatattcactgtgggaaaaactgagcaatggaaagctccgattctaccagagcttgacattgataacatatcccacaaactccatgatgaccctgaaaccattcaaatggcttcaagggactatggccatttaacgcatgaattcccattagctgtgtttcgtccatcttctatagatgacatagtcaccttgataaaatcttcgtacaatagctttgccccttttgacatagctgcgaggggccaaggccactccactcatggacaagccatggctcgtgatgggattgtggtggacatggccagcctaagaaaacaaagaaatggggttgcgattagtgtctctaaggaccctttgatgggtcactatgctgatgttggaggggaacaactctggattgatgtgctacatgccacacttgaatatggacttgcaccagtttcttggactgattatttgtacttgaccgtgggagggacactttctaatgctggaatcagtggccagagcttccgttatggacctcaaatcagcaacgttcatgaaatggatgtcatcactggaaaaggagagttcgtaacatgctcttcacagaagaacttggagttattccacgcggttcttggaggcttgggacaatttggagttatagcaagggcgagaattgctcttgagccagcacccaaaagggttaagtgggtcagactactttatagtgacttttctgcttttaccaaagaccaggaacgattaatctcaatcaatggaaggaaacaaaagaacgcattggattttctggaagggatgctgctaatgaaccaaggccccataaataattggagatcctctttcttccctctatctgaccatcccagaatagcttctttaataactgaacatagcatcctctactgtcttgaagtggctaaatattatgacgaacaaaccgagttaaatgtggacaaggaaattgaagttttgctccaaggactagcctatatccctggatttaattatgagaaaaatgtctcgtacgttgagttcttgaatagggtccgaagtggagagttgaaacttcagtcacaaggactgtgggaagttcctcacccgtggcttaatttgtttataccaaaatctcaaatcttggattttaattcaggagtattcaaagatatagttcttaaaagaaacatctcctctggaccagtcttggtttatcccatgaatagaaacaagtgggacgataggatgtcagcatctataccagacgaggatgttttctacacagttgggtttttgcactcaagtgggtttgatacttggaaggcatatgatgctcaaaacagagaaattttggagttctgtagagatgctggcatcatggtcaagcaatatcttcccaaccacagcacacaagaagattggacaaaccattttggtgctaaatggatgaaattcttagaaagaaaacatcagtttgatccaagaatgattctatcacctgggcaaaaaatcttccacaaaaaattacagccagtgttttaaatattttccctaataaaaaaagtaaaaatgttttgtggtgggactacctcaattagatggctagctagggacaggtgtacatacagtgtgaccaagaccaagatggcttttgtatgctaaagtttgcattgctagctagagaaattaataaggtggggcattaaaggctgcatgagtacttttggcacctattatgctacatattaccttagatacgttaggttgacaaagtcgtactggtaggtacaagaagcacagttgtctctcacactgtctgtcacccaacttgctatatagtgtgtggagaaattcggatcatattgaagatgctgtgagttatagtcctccaatattaaatgtttaacgattctgtctttctcttata

SEQ ID NO: 202 - DNA, 1711 bp, Glycine max
aacaacaaagcactctctcttctctcattctattatcttctctcatcctcttattctctccaaaccaacaaaaaaaaaaatggttgctgagaactacccttctcccacatacttcatcctcctgttcataaccataacacgtttgatctccacagtgggcaaaacctcccaatggacgaaggccctgtcgctgactccggaactcgcctccgtctccctcgacgacaccatcttctgcaagctccgtgacgacccagaggccctccaggggagggcctccagggactacgggaacctcgtccgcgaggttcccttggcagtcttccacccagcctcagcgagcgacatcgcgaggctgatcaagctgtcgtacaacggctctgtccccttcaagattgcggcgagggggcaagggcactcgacaaggggccaggcgatggcacgtgagggggtggtggtggacatggcggggttcagagagagagggaatggagtggggataagggttgtgagtagtgtggaccctaataataagaatggttactactattatgcggatgttggaggggaacagttgtggatcgatgtgctacacgccacgctcgagcatggacttgcacctatgtcctggactgattacttgtacttgacgctgggagggactctctccaatgctggcatcagtggccagacattccgctatggtcctcaaatcaccactgtccgggaaatggacgtaatcaccggaaagggagaatttgtgacttgctctcagcagacgaattcggagttgtttcacgcggttcttggaggcttaggacaatttggaattataacaagggcaagaattgctcttgcgccagctccgaagagggttaaatgggtgagacttttgtacaatgacttttctgcttttaccaaagaccaggaacaactaatatctgtcactggaaggaaacaaaatgtttcactggattatttggaaggattgctgctaatgcaccaaggacccataaataattggagatcttctttcttccctttagccgaccatgcccgaataatttcgctagtaactaaacacagcgtcctctattgcctagaagttgccaaatattatgatggccaaaatgaaaacaatgtggacaaggaactccaagttttactacaaggattgagctatatccctggattttactatgaaaaagatgtctcatattttgagttcttgaatagagtccgaagtggagagttgaagctacagtcacaaggactatgggatgttcctcacccgtggcttaatttgtttataccgaaatctcaaatcatggaatttgactcgggcgtgttcaagaatatcatccttaaacgaaacatcaccacaggacctgtcttggtttaccccatgaatagaaacaagtgggacaataggatgtcagcatcaatacccgacgaggatatcttctacacagttggatttttgcattcaagtgggtttgataattggaaggcctatgatgctcaaaataaagaaattctacaattttgtaacgttgctgggatcaaggttaagcaatatcttccccactatcgcacacaagaagattgggcaaaccattttggccctaaatggaggacttttgtagaaagaaaacaccagtttgatccaagaatgattctatcacctggacaaagaatctttaacaattaa

SEQ ID NO: 203 - DNA, 2061 bp, Glycine max
acaccacaactccaaacttttcctcttattctcttcttcaacacaactagcttagtcttataatccagctcatctctctctccaaaatggctctacactacccttttccaacctacttcatactactactagtaaccataacccgtttgatatacaccgtgggaaaaaccgagcaatggaaagctccgattctaacagagcttgacattaataacatatcccacaaactccatgatgatcctgaaatcattcaaatggcttcaagggactatggccacatcgtgcatgaattcccattagctgtgtttcgtccatcttctatagacgacatagccaccttgataaaatcctcctacaatagctttgccccttttggcatagctgcgaggggccaaggccactccactcatggacaagccatggctcgtgatggggttgtggttgacatggccaacctcagaaaacaaagaaatggggttgcgattagtgtctctaaggaccctttgatgggtcactatgcggatgttggaggggaacaactctggattgatgtgctacataccacacttaaacatggacttgcaccagtttcttggactgattatttgtacttgaccgtgggagggacactttccaatgctggaatcagtggccagagcttccgttatggacctcaaatcagcaacgttcatgaaatggatgtcatcactggaaaaggagagttcgtaacttgctcttcacagaagaacttggagttattccacgcggttcttggaggcttagggcaatttggagttatagcaagggcgagaatagcacttgagccagcccccaaaagggttaagtgggtcagactactttatagtgacttttttgcttttaccaaagatcaggaacgattaatctcaatcaatggaaggaaacaaaagaacgcattggattttctggaagggatgctgctaatgaaccaaggccccataaataattggagatcctctttcttccctctatctgaccatcccagaatatcttctttaataactgaacatagcatcctctactgtcttgaagtggctaaatattatgacgaacaaaccgagataaatgtggacaaggaaattcaagttttgctccaaggactagcctatatccctgggttttattatgagaaaaacgtgtcgtacgttgagttcttgaatagggtccgaagtggagagttgaagcttcagtcacaaggactgtgggatgttcctcacccatggcttaatttgtttataccaaaatctcaaatcttggattttaattcaagagtattcaaagatatagttcttaaaagaaacatctcctctggaccagtcttggtttaccccacgaatagaaacaagtgggacgataggatgtcagcatctataccagacgaggaggttttctacacagttggatttttgcactcaagtgggtttgatacttggaaagcatatgatgctcaaaacagtgaaattttggagttctgtagagatgctggcatcaaggtcaagcaatatcttcccaaccacagcacacaggaagattggacaaaccattttggtgctaaatggataaaattcttagaaagaaaacatcagtttgatccaagaatgattctatcaccagggcaaaaaatcttccacaaacaattacagccagcgttttaaatatttcccctaattaaaaaaagtaaatgttttatggtgggactaccccatttagatggctacctagggacaggtgtaaatacaatgagaccaagaccaagatggctttaatttgtatgttaaactttgcattgctagagaaattaataaggtgcatgagtactttggcacctattatgctacatataccttagatacgttataggttgacaaagtcgtactggtaggttcaagaagcacagttgtctctcacattgtctgtcacccaacttgctatagtgtgtggagaaattcggatcatattgaagatgttctaatgagttccagtccttcattaagtgtttaacgattctgtctttctttatat

SEQ ID NO: 204 - DNA, 1715 bp, Glycine max
ggagaggacagaatttgggataatcatcatagttcgatggatgatttgacagatattgagaaagaagacattgaccgtgcaattgcactttctctgtcagaggaggatcataaagggaaaaaagttgttgattacgactctcaatctgaagatgaggaactttgtaaaattgatgatgaggaagatgaacatcttgttaaagttcatctagaagaagaagaacgtcttgctaaaattcaacaagaagaagaagaacgtcttgctaaaattcaacaagatgaacgtcttgctaaaatccaacaagaggatgaacgtcttgctaaagctcaacttgaggaagacgagcaacttgctagggcaattcaagaaagcttgaaaattggttctcctcctcgatatgacaacgattcttcaattctatcttttcctcacctctttccccccggatacagaatctgtgctggatgcaagactgagattggccaaggaagatttttaagttgcatgggaggtgtctggcatccagaatgcttctgctgccatgcatgtcatcttccaatcactgattatgagttttccatgtctagcaatcgcccttaccataaagcatgctatagggagaagcatcacccaagatgtgatgtttgtaagaactttatcccaactaattcatctggtctcattgagtatagagctcatcctttctggctacaaaaatactgcccatcacatgagcttgatggcactcctcgttgttgtagctgcgaaagaatggagtctagggatacaaaatatcttttgcttgatgatggtcgaaagctatgtttagagtgtctagactcatcaattatggatactcatgaatgccaacctctttaccttgaaatacaagaattttatgaaggtttaaatatgaaattggagcagcaaattcctatgctcttggttgagagacaagctctgaatgaggctatggagggagaaaagaatggtcatcaccacttacctgaaactagagggctatgcttgtcagaagagcaaactgtcaccaccatttcaaggaggccaaggattggagcaggctaccgagccatagacatgataactgaaccttataggttgatccgtcattgtgaagtgacagccattcttgttttgtatggccttcctaggttgttaacaggatcaatcctagctcatgagatgatgcatgcatggcttaggcttaaaggttatcctaacctcagtccagaagttgaagaaggaatctgccaagtcttggctcatatgtggttggaatcagagctctattctggaactgggaatgacggtgcatcatcctcagcatcatcttcttcttcatcatcgccttcctcttctgtttcaacaaagaagggtaaacggtccgactttgagaagaaacttggtgaattttttaaacaccagattgagtcagatacctcttcagcatatggagatggattcagattgggtaaccaagcaatgctcaagtatgggcttaaaaggacccttgaccatatccatatgacaggaagttttccatattgagaattgaaaatttgaaagaagatataattttctgacttatacattgaccattaccgcagcttggtcaataaactatatagttcaaagtttccaagatcatatagtttaattctagacaaaataaggaataaaattgctcctctttc

SEQ ID NO: 205 - DNA, 1633 bp, Glycine max
atggtgtcatcaaaacctggtggcttctatgaacaagggagatttccatcgatcaaaatcctcatacttgtactccttaattctatactccacaaagccaactcaggcagcaacaactctgcttccaactccttagttccatttccacctcatgagatcctctcatcattgcaaacactacctctacatggccactttagcctaagggacaatgaggatgctgccaaggactttggcaacatacaccattttcctcccctagcagtgctgcatccaaaaacagtttctgatatatcactcaccattaagcatgtttttgaaatggggtttgcctcacagctgaagattgctgctagaggccatggccattcacttcaaggccaggcacaagtacatggaggcctagtcattaacatggagtcactgcagggtcctgaaataaaagtttacaatggagaattgccttatgtggatgtctcaggaggtgagttatggataaatattctgcatgaaactcttaaacatgggttggcaccaaagtcatggacagattaccttcatctcactgttgggggcactctttcaaatgctggtataagtgggcaagccttcaaacatggacctcagatcaataacatctttcagcttgaagtgatcacaggaaaaggagaggtggttacctgctcagggaaccgaaatgctgaccttttttatggtgttcttggagggcttggtcaatttggcatcattacaagggctagaatttctcttgaaccagcacctatgatggttaaatggattagggtgctctactcagaattttctacatttactatggatcaagagtatttgatatcacttaacaacacatttgattatattgaagggtttgtgatcataaacagaactggcatccttaacaactggagatcatcctttgatcccaaaaacccacttcaagccagccaattcagttctgatgggaaaaccctctactgtcttgagatggcaaaatacttcaaccctgatgaagctgaagccatgaatcagagtgttgatcagctactgtcaaagctgagttacattccgtccacactcttcctatcagaagtttcttacgtggaattcttagacagagtgcatgtttctgagaataagctaagagcacaaggcttgtgggaagttccccatccttggctgaaccttctgatcccaaggagtgagattcatgactttgctgaagaagtatttggcaatattcttaaagacacaagcaatggacccatactcatttaccccgtcaaccaaacaaggtggaacagtagaccatcgttggttactccagaggaagatgttttttacctggtagcactcctatcctcagcactcccaaattctacaggtgcagatagtttagaacacattctagcccaaaacaacaagatcatagatttctacacgggtgcccaactgagagtgaagcaataccttccccattacagcacacaggaagagtggcaagtccattttgggtcacgatgggaggcattcgtggaaagaaaaagggcatatgacccactagcacttctagcccctggccacagaatctttcaaaaggcagtgtcttcttcat

SEQ ID NO: 206 - DNA, 1812 bp, Glycine max
gtaagttattagatcacacacttcgcaccaaaaacaaaacctaatttcttcaattgagcctcgattcttccgctatttgttcaaaggagaatttttatttatttatttatttttcttctgagtatgaagttatagcgaatttgagtgagtgaatgggttggcttagcagaatttttaaaggctccgatcataataagctttcggaagggcattactataaagaggatgcgggttattacttgccatccacttcgggggtaacaaatgatgcttggaaccagagccagaaccagaacgagaatgaagatatcgatcgtgctattgcactgtctctggtggaagagactcagaaagcaaacaacaatgtaaatgactacagatcacaattagaagaagatgaacaacttgccagagctatagaacaaagtctaaatttggagtctcctcccagatatggaaatgaaaatatgtatcaaccaccaattcagtatttccccatggggtccaggatttgtgctggctgctatactgagattggttatggacgatatctgaattgcttgaatgcattctggcatcctgaatgcttccgctgccgtgcttgcaacctaccaatctctgattacgagttttccacatctgggaattacccttatcataaatcatgctataaggaaagctaccatccaaaatgtgatgtctgcaagcacttcattccaacaaatcctgctggtcttattgaatatagggcacatccattctggatccagaaatattgccctactcacgaacatgatggtactacacgctgttgcagctgcgagcgaatggagtcccaagaggcaggatatattgctcttaaggatggccggaagctctgcttagagtgtcttgattctgctatcatggatactaatgaatgccaaccccttcatgctgatatacaaagattttatgaaagcctaaatatgaaactggaccaacaaattccacttctattggttgaaagacaagcactgaatgaagcaagagaaggagagaagaatggccactatcacatgccggaaaccagagggctctgcctctcagaggagctcagcactttctcgagacgacctagacttgggacaacaatggacatgagagcacagccatacagaccgactacacgctgcgatgtgactgcaattctcattttatatggtcttccaaggttacttactggatcaatcctagctcatgagatgatgcatgcatggctgcggcttaaaggttatcggactctaagtcaagatgttgaagaaggtatctgtcaggttttgtctcatatgtggttggagtctgaactttcttctgcatcaggcagcaactttgtatcagcctcatcctcgtctgcatcacatacatctagaaaaggtaaaagacctcagtttgagaggaagcttggggagttcttcaaacaccagattgaatcagacatttcccctgtttatggaggtgggtttagggcaggtcaaaaagcagtgagtaaatatggtctacaaaggacccttcatcatatcaggatgacagggacttttccatattaagtacaaagataccccttttaacagattgtttctcattatttctagatataaagcctggcctgttattattagaaaccgaggccaaggtgcttaggcataagcttccacgaattgttgattttttgtacttgtaattattgataccgttcattcacattttttcttttgatttatcagactgctattttttggcattaccaacttccaaccgctgctatctccc

SEQ ID NO: 207 - DNA, 1727 bp, Glycine max
atgggtaataaacttgggaggaggagacaagtggtagatgagaaatatacgaggccgcaagggttgtataatcacaaagatgtggatcacaagaagctgaggaagctaatactagaatcaaagttagcaccttgctatcccggagatgaagaaaccacctacgatcgtgaagagtgcccgatttgctttctgtattatccaagtctaaaccgatcaagatgttgcacaaagagcatttgtacagagtgctttttgcagatgaaagttccaaattcaactcggcctacacaatgtcccttctgcaaaatggcaaattatgcggtggagtatcgtggtgtgaaatcaaaagaagagaagggattggaacagattgaagagcaacgtgttatagaggcaaaaattaggatgcggcagcaggaacttcaggatgaagatgaaagaatgcacaaaagactagaaatgagctcctcgaatgtgaatgtggcagttgcagatgttgaatacagttcaaatgcagtgtctgcatcttcagtttctgttgttgaaaatgatgaaattgtttcttctcaagactcatgtgccacatcagtggttagaccaaatgcaaccactaggaccaatagagatgatgaatttgatgttgaccttgaggacattatggtcatggaagcaatttggctttccattcaggagaatggcaggcagagaaatttatctttttccgatgctacttctggacactatgtagctgatggtcgctatgtttcatctgcctcatccatcacgggtccaccaacgggatcatcctcgtctccatctgggggtctcgcttgtgccattgcagctcttgctgagcgccagcaaatggctggagaatcatctatgagcatcactgatgaaaatatgccatcattcaacacactacctggttccagaaggttttataacagacttggtagggatatggcttattatccacctgctgaaaacctcaacgaggagccactggatgaagctgtggcgatgactaggagtcatggtgaatgggacacggaccatgggacaccgttgactgaaacagcaactagctatacaaactctgtcacagcagaagatcgtggtgaactatcttcattgctacggtctgatgacattgatggaagcctacaaagtgccccagaacccattgttcctgagagttttgaggagcaaatgatgctcgctatggctgtctctttggctgaagctcgagccatgtcaagtggacagagtgcttcttggcagtagtttttggttgaggtgctggtttaatcttttcttaaattggtgatgcttgccttggctatttggcaagccaagtccaaggttgagaatttgagggaagttcacttgtgtgcaatttgttcaaggatcaggtagtgatctcttctcacacgaatttatatatattaatgtcaaaggaaaactaatgattctagttggtgaaaggttgttgcttaatgccattttttttacttgtgtccgatgtcctctcctgccctctcattggttttctgtaaatagttttagtctttgatagatgtactttcattcttacagtaatatatggcacattttagacacgtactgaagatgaaagggaattaaatttctgtcatgcaaacttatctgttctattcattgagatctgagttatatagaagttatgcctgttaggcgtggcactt

SEQ ID NO: 208 - DNA, 2111 bp, Glycine max
gttgaagctgggatgctttcggctaagcttgctgaaactggcctcgtctatgctgtattgggcagttaggcgaattcaaagatctttgaacacctccttctttattacctttttccaacacctacctcttctttctctttctccctctcacacactcgtcctaggtttgattttcccttccttctcccaatactcctccattattttataacactctagcttcgttacttgcccttttctctgcccagctacatgcttgtgtaagaactaataagccagctgaagaatgtgggatctgaatgactcccccgatcagagaaaggactacgagtctgaaggctgttcttcttctctgtatgatgataaaggcaagagggtggcatctgtttccaattcaagctcctctgcggtggtcgttgaagatggatcggaagaagaagacagtgaaagaggtggaagcagaacattggataacaagaaaaccaacaaaatattcggcttctctgtagctcatgatgacagtgaccacccacccgtcactcatcagttttttccggttgaggactccgaacttccagtcaccgctgccgccgccgcggccggaagctccttcccacgtgctcactgggtaggcgtcaaattttgtcaatcggaaacacccggcgccggaaaagcagtgaaagtgtcggagccgatgaagaaaagccgccgaggaccacgctcgcgcagctcacagtatcgaggagttactttctacagaagaaccggtagatgggaatctcatatatgggattgtggaaagcaagtatatttgggtggatttgacacagcacatgcagctgctcgtgcgtatgatagagctgctattaaattccggggagtggaggcagacatcaacttcaacatcgaagactatgaggaagacttgaagcagatgaccaatttaactaaggaggagtttgtgcatgttcttcgccgacaaagcactggatttcccagaggaagctccaaatatagaggcgtaactttgcataagtgtggaagatgggaggctcgaatgggccaatttttgggcaaaaagtatgtctatctgggtttgtttgacaccgagattgaagctgcaagggcatatgataaagcagcaataaaatgcaatggcaaagaggctgtcaccaattttgatcccagcatctatgatggtgagcttaattctgaatcctcaggaggtgtagctgcagatcacaatttggatttgagtttgggtaatttgatctctaaacatagcaatagtcaatcatcgaggaatcacttcccaaattctgcaaccgatcagcatatgccacctgaatctaattggcagagtgggggaagcaagcctaagctggttaatatacttccaaaaccatgtggtagaagcaacatggaagcctatgggcaaggtgagagtgaaaccttgaggttgctaagccaaactcaccttcaatccccaaccactaaagaaatgcacagatatggtccgtataggtcgccagcagagccacaaatgcctcacaatttcgcacatcatcttcaccaaccaagttttcatgttcctagcagcagcagcaaccgaggccgtattggaagcgatctttcgttatcaatgtccgatcaacaacaatggcaacaagccgggcctccacatttgttagcaactgctgcagcatcatcaggattcccacagcaaattagaccctcccaaggttggctgcagaaaaatgggttccactctctcatgagaccctcatgaccctcaagatattatttctaccatgccattttccatttgaaaaataatctccccctatttgttttgtgagcatgtatgtacgagtgaatgcagtttagattattgtttatgttatgtccaacctcccccttctttaggaaaagcccatacataactgtaactttactattgggtgaaagaatagggagagccaaattgggaactcactctggacttgttataggccagtcaaactaaccaacgtacgaaatctttaactagatactaagatattctgggctctgactaaagtttctgatcttatataactatgatttactgc

SEQ ID NO: 209 - DNA, 1634 bp, Glycine max
gctttcggaagggcattactataaagaggatgcgggttattacttgccatccacttcgggggtaacaaatgatgcttggaaccagaaccagaaccagaacgagaatgaagatattgatcgtgctattgcgttgtctctggtggaagagagtcggagagcaaacaacaatgtaaatggctacagatcacaattagaagaagatgaacaacttgctagagctatagaacaaagtctaaatttggagtctcctcccagatatggaaacgaaaatatgtatcaaccaccaattcagtatttccccttggggtccaggatttgtgctggctgctatactgagattggttttggacgatatctaaattgcttgaatgcattctggcatcctgaatgcttccgctgccgtgcttgcaacctaccaatctctgattacgaggtctccacatctgggaattacccttaccataaatcatgctataaggaaagctaccatccaaaatgtgatgtctgcaagcacttcgttccaacaaatcctgctggtcttattgaatatagggcacatccattctggatccagaaatattgccctactcatgaacatgatggtactccacgctgttgcagctgtgagcgaatggagtcacaagaggcaggatatattgctcttaaggatggccggaagctctgcttagagtgtctagattcttctatcatggatactaatgaatgccaaccccttcatgccgatatacaaagattttatgatagcctaaatatgaaactggaccagcaaattccacttctattggttgaaagacaagcactgaatgaagcaagagagggagagaagaatggccactatcacatgccggaaaccagaggactctgcctctcagaggagctcagcactttctcgagacgacctagacttgggacagcaatggacatgagagcgcagccgtacagaccgactacacgctgcgatgtgaccgcaattctcgttttatatggtcttccaaggttgcttactggatcaatcctagctcatgagatgatgcatgcatggctgcggcttaaaggttatcggactctaagtcaagatgttgaagaaggtatctgtcaggttttggctcatatgtggttggaatctgaactttcttctgcatcaggcagcaactttgtatcagcctcatcctcatctgcatcacatacatctagaaaaggtaaaagacctcagtttgagaggaagcttggggagttcttcaagcaccagattgaatcagacatttcccctgtttatggagatgggtttagggcaggtcaaaaagcagtgcgtaaatatggtctacaaaggacccttcaccatatcaggatgacagggacttttccatattaagtacagagattccccatttaacagattgtttctcattctttctagatataaagcctggcctgttactattagagaaaccgaggccaaggtgcttaggcattatagcttcgacgaattggtgattttttgtacttgtaattattgataccgttgcggatatattgattacattcacatttttttttaatgtatcacactgctactttttggcattaccaactcccaacctctgctatctcca

SEQ ID NO: 210 - DNA, 1080 bp, Glycine max
gttgaagggtattttatatatagtgtgtagtgtggtggttttttctcttcttgaaggtgcaaaaatgaatgatggtagacaaatgggggtgaattacgtagacgctgggttcccttatgctgttaatgaaaacttcgtggatttcttccaaggattcactcctgtgcccgtcaattatgcctttgctggctcaattcctgatcaggaaagtgtctactggtcaatgaacatgaatccctataagtttggattgtctggccctgggagtacatcttactatagttcttatgaggtaaatggtcatttgccgagaatggagattgatagggctgagtgggaatatccttcgacaattaccactgtggaagagcctgctacaacagattctccacctagaagagatggagtcacgaacatgcagaccatccctgaagaatgcagtccaaatcatcatgagtccaatagtagtagccaggtcatatggcaagacaacatcgatcctgataatatgacttatgaggaactactggacctgggagaggcagttgggactcaaagccggggtctttcccaagaacttattgatatgcttccaacctcaaagtacaaatttggtaacttattcaaaagaaaaaattctgggaaaaggtgtgtaatttgtcagatgacatacagaagaggtgaccaacaaatgaaattaccatgcagccatgtctatcacggtgaatgcatcaccaagtggcttagcattaacaagaaatgtcctgtttgcaacaccgaggtttttggcgaggaatcaacgcattagcatcaagatggcaaaagggatcctttttgctctattaatttttgcttctcatccaactctccctctctctctctctctctctctttctctctctttctctttaagttttaatttcttacacgtaggtagatgtagtatgaagaactctatggcagctctcacaatatatgttttgtttactagaaacaacctaatggagtcgcatcttctagtggttaatgtgtgattttgtgtattcatgcaatatatattcctcttagcttttgtgcccc

SEQ ID NO: 211 - DNA, 1142 bp, Glycine max
gtttactcattcccctcccaactaaccgtgacagcatccttttgcgttttcaacaccctctcaaccgtcacctcccgccacgtgtcactccctcattcgccctcctccggcgcctgtgatcaccgcttcccaccgctatcaaaacccccaacacctcaacctttcttcttttttttttttccttcttctcttcgtcacgatttctatcctcgtcgcactttcgaacactgaaaattgagattgcagaagaatatcaatggagatggctcaggttaaggcacgagctcgaactgcattggccatggcagcttccgcaacttcaccgaagagaagaaaaatctccttcgttcaaatcaagagtttgagcaacgctacctctccgacgacggaggaacgaatctccggcgaatctccggcttcgtgctgctccagcaacggatccttcgacaacgaaaaccgaatcatcaaatcctcagatctagaggttgagagtgcgcaagttgaaacatggacgtgcaactgcggtgaacaacaacaacaaaaaataaggagagagatgagtctcacgcgcgaggtggattcaacggaggagcatatcaccaaaaccaaatctcgctgcgttccaacggagtcggagctcgaagatttcttcgctgctgcggagaaagacattcagaaacgcttcacagacaagtataattatgattttgtgaaggacatgcctttggagggacaatacgagtgggttaaattgaagtcataaaagtgaaagtaccaaccttgaaagaagaagaagaagaagaccgttaattaaaaaatcatgccacttgctgacattatttttacgttaattaatttactttaggtacttcattttttacttcgacttttcgttttttcacggtaggactacgtttggtgtacagttaattttatttttcttcttctatggttaaattccctttgttatttatttgtgtacggtttatgatatagttatacggagaaagctagttctgtgaattccgttgatggtagtgactgtggcgaaaacgattcctataaggctacaacaaaattgtagtctctcattttttttttcccctttctttgtgctttgcaaatcgcaatttcccccctaa

SEQ ID NO: 212 - DNA, 1310 bp, Glycine max
attttggctcgaggccagtactctctccaatcttcactccccaaacagaattctccgaaacaatctctatatatggattcttcgttcctaacctcatgattctcgttttctcattcttcccctccccccaaccaaccgtgacagcatcaatttccgtttccgacaccccctcaaccgtcacttcccgccacgtgtcactccctcattcgccctcctttcggcgcctgtgatcaccgctatcaaaaccctcaacacctcaaccttttcgagtttgtaacctctttgtcacgttttcctcgtcgcacaaacaccacactacacttttgaacactgaaaattgagatcgcagaagaagaatattaatggagatggctcaggttaaggcacgagctcgaactgcattggccatggccgcttccgcaagttcacggaagagaagaaaaatctcgatcaacaacaacttcgttcaaatcaagagtttgagcaacgcaaccgtgccggcgacgggggaacgaatctccggggaatctccggcgtcttgctgctccagcaacggatccgtcgacgatgaaaaccgaatcatcaaattctcagatctagaggttgagagcacgcgagttgtaacgtcgacgtgcgactgcggtgaacaacaacaacaaataaggagagagatgagtctcacgagcgagcttcgaatcacgaattcttcttcgcaagaggtggattcagcggaggagcagatcacccaaaccaaatctttgccgccgcagaaaatgccgacggagttggagctcgatgaattcttcgccgctgctgagaaagatattcggaaacgcttctcagacaagtataattatgatattgtgaaggacgtgtcattggaaggacgatacgagtgggttaaattgaagccataaaagtgagagtaccaaccttgaaggaaggaaggaacaatagaagaacacggttaataaaaaaatgccacttgctgacattattcttacgttaatttactttaggtacttgatttttcacttcaattttccgtctttcacagtagtactacgctttgtttggtgtacagttaaatattatttttcttctatggttatttgtgtacggtttatgatatagttatacggagaagctagttctgtgaattccgttgagggaggtgactagcgaaaacggttcctacaaggctgtaacaaaattgtagtctcattttgctttctttgtgctttgcaaattgcaattcccccctaaaattcgtgtctgtttctcttttttaactttgaagaagggtacat

SEQ ID NO: 213 - DNA, 1144 bp, Glycine max
atgggcaagtacatgaagaagtccaaaatcgccggcgacgtcgccgccgtgatcatggaggctccgccgccgcactcccacctcggcgtccgcacccgcgccaagaccctcgctctccagaacaacaccacctccccggacccctccgcctacctccagctccgcagccgccgcctcctcaagctcccccctaccccgccggaaaatccccgccgctcctccgccgaaaccgccgccaatttccgcctcgccaacgcccaaaagcttgcatctttcgaagacgacaacaacaccgaatgctctttcggcgagaatttcttagacgccgagcccagagaagaaaggagcaccagggaaggcaccccttgtagtttaataagggactcaaatgccattcatacccctggttcaaccacaaggccaaggactcgccaaataatccatgaacacgtacaaagaaatattccaacggcttatgagatggaggagttctttgcttatgctgagaagcagcaacagacaatatttatggacaagtacaatttcgacattgtcaatgacgtacctctgcctggacggtacgagtgggtcccagtactccactaggagtgtcatatggtggtgattatatatatggattgcaagaaccattcgacgtgtattttaattttaacaactagaagaagctttcactaaccatttagattgcttgaggctgttgtttaacaagctacaagggaaaggatctgtttagaaatttccaatatctgattagtagtttagtagtgtctttctgatttgtagggtgtagggggggtatatggtatatctagtttttaggtcatctttattgtaatttcattaccttctgtttatataattcagtggggattagacatgatgtttatgtagagagtagtactcatccatctaaggtcctcatgctggaaatttggcttggggaccatcttagtgttttatgcccccacaggaccacaaggaatacctttaatgttagggaagggattcaaacataagatgcatgacaacctgtgagtgtgtgcttgtttaagtgtttaaactcacattcatcggaaaattacgcgttcaaaagctatagcaatgcgagggcagtttttttttc

SEQ ID NO: 214 - DNA, 994 bp, Glycine max
agcccatctcaaaatagaaacacaacacaacacaacacagagaatgggtgagtgtaaacgctgctctctcacaattgccgccatagaacaaccttcttcaagccaacattccatttccaagaaaagaaaaaccaccgcttccttccagttacgctcttccgatacgcagtttcccgacactatcgtctcgccggaagcttccgtcagttctaccggcacggttgtttccggcgatttttgctccgatcgctcttgctgcagctccagccactttaaggacctccactccgtgccgtcagatctgcagaccaagggtttccaaacggtagaggactcaaccaaccgctacttcaagccgttcagtttgttgagtgagttttctggagactcggaggaatcggcgaagtcttccgcggcagtgcggaaattgaagacgccaccacaagcagagatcgaagagtttttcgcgatggcggaaaagtacgagcgaaaacggttcacagagaagtacaactttgatattgttagagatttgccgttggagggtcgctaccagtgggttcgtttacattgaatgccttcaatgaaagagagagagagagagagagagtttgcattttttagttttagagagagaaatggaggttgatgagtttgtagtgtttagtcatttgagtacactggtaaggaagctaacctgacacgaggtaaaacgaaaacgagcgtgcaactttttctggttgctttgaaaaagacggtggtggtggtgggttggtttacgtatagctaactgttttctctttctctttatgttggatacaacaagctagctttttctgcaatctctgcactctgatagaagtagtagaaccttctttgtgaggtgatgaagaaaaacaaaaaacaaaattgggttttgtgggaaatatacaaagaacacaagaatttccgctatgaatattggtgatctaaaatatgttaatgtaattgagag

SEQ ID NO: 215 - DNA, 1116 bp, Glycine max
accccatctcaaaatagaaaaaagaaactctcccacaatacaaacacagacacagagaaagaaaagaataatgggtgagtgtaaacgctgctgctctctcacagttctggccatggaagaaccttcttcaagccaacattccattttcaaaaaaagaaaaaccaccgctactgctgctcattccacttccttccagttatgctcttccgatatgcagtttccccacactatcgtctcgccggaagtttcatttagttccgcctgcacggttgtttccggcgagttttgctccgatcgctcctgctgcagctccagccacgttaaggacctccactccgtgccgtcagatctgcagaccaagggtttcgaaacggtagaagactcaaccagcctcaatttcaaatcgttcagtttgttgagtgagttttccggagactcggaggaatcggcgatgattccggcgaagtcttccgcggcggtgctgaaagtgaagacgccgccgaaggcggagatcgaagagtttttcgcgatggctgaaaagtacgagcaaaaacggttcacagagaagtacaactttgatattgttagagatttgccgttggagggtcgctaccagtgggttcgtttacattgaatgccttcaatgagagagagagagatagagtttgcatttttagttttagaaagagaaatggaggttgatgagagggtgagtttgtagtgtatgtttagccattggagtacactggtgaggaagctaacctgacacgaggtaaaacgaaaacgagcatgcaacttttgttggttgctctgaaaagacggtgctagtggtagtggtgatgggttggtttatgtatagctaactgttttctctttctttttatgtgggatacaacaaggtggcttttctgcaaactctgcactcagaatagaactagtagaaccttctttgtgaggtgatgaagaaaaagaaagaaaaggaaaaagtaactaaattgggttttgtgggaaatatacaaagaacacaaaaattcctgctatgaaaaaatattggtgatctaaaatatgggtattgtgggaaatattaattgttgtttggtaattttctatgaaaag

SEQ ID NO: 216 - DNA, 835 bp, Glycine max
atggggaagtacatgaagaagtccaaaatcgccggtgacgtcgccgccgtgatcatggaggctccgccgccgcactcccacctcggcgtccgcacccgcgccaagactctcgccctccagaatacctccccggactcctccgcctacctccagctccgcagccgccgcctcctcaagctcccccctaccccgccggaaaatccccgccgctccgccgccgaaaccgccgccaattcccgcctcgccaaaacgacgtcgtcccgtaacgccgaaaagttcgcatctttcgatgacgacaacaataccgaatgctctttcggcgaaaatttcttagacgccgaacccagggaggaaaggagcaccagggaaagcaccccttgtagttttataagggactcaaatgccattcatacccctggttcaaccacaaggccaaggactcgccaaataatccatgagcacatccaaagaaacattccaacggcttatgagatggaggagttctttgcttatgccgagaagcagcaacaaacaatatttatggacaagtacaatttcgacattgtcaatgaagtacctctgcctggacggtacgagtgggtcccagtactccactaggagtgtcatatggtgataatatgggatttcaagagccattagacttgtattttaattttaacaactagaagaagctttgactaaccatttagattgcttgaggctcttgtttaacaagctacaagggaaaggatctgtttagaaatttccaatatccgattagtagtttagtagtgtctttctgatctgtagggtgtagggggggtatatggtatat

SEQ ID NO: 217 - DNA, 1236 bp, Glycine max
tttcctttctctctcactcgaaacaaaacaaaacaacacaaccggaaaaccaaaccacctctccctgctcccgccgctgttttccgccgctgtcgccgtcgttcccgcctcaccgtggcggcgcgcgcgtctccgatgggaaagtacatgaagaaagcgaagccgaaaggagaactcgcgctcgtcgaatccaccaccagcaacaccaccacctcctacatgggggtccgaacccgcgccaaaaccctagcgcttcagaaatcgcacgcgcagcagcacgagctcgccgccacctccgactcctacctccagctccggagccgtcgcctccagaagcctccgattttggtccactctccgaagcgccctaagcacccgaaccctaaatccccaatccccgaacctcccaggctcggactcgcttcggagcgcgacgctaccctcaaccacaacaaggacaatactttgcatgagaatgccgagcctcaggaagcgtcgttcggggaaaatgttttggattttgaaggtagagagagaagcactagggaatccacaccttgcagtttgataagggactcggatactgtcaggactccgggttcaactaccaggcctacttgttcagctgaagcttatcgaagaacagagcatgcagctagaaggcaaatcccaacctcccgtgaaatggatgaattctttgctgaaattgaagaggctcagcaaaaaaaattcattgagaagtacaactttgatcctgtgaatgagaagccgctctcagggcgctatgaatgggaaaagttgaaaccctagaagggtaatgtagtgttccatcaagacatctttgaagtagcaggcaggcagcagggttagaatttgttgaagcggtggtggcgttatttcacttttccatcaccttctatttacttgtaaagaaagtaggactcttaaaactgtgtagactaatggtctgtaactttacagaggttgttgattacacaacaatacaaatcaaaggcctttgtctaacagatcattttaaggaagggggcaagggaagaaggggctgtagcgcgtaggattagggatcagtcaaattaggtcagtatgaggtacaggaatttacctaggttttctcttgttcttgtattttactcatcttttgtctatacttgtactgatggaacttgaacaaacttttagaaataaagacccgattcccccacctaaatttctgtc

SEQ ID NO: 218 - DNA, 1424 bp, Glycine max
aagcatcctctgttcagagcctcattaagtttttctctctttcacttatttattgactctccataagcccttcaaacctctctctattcctctctactagtcaccttctcccttccattcactccacttcttaacacccccaaacagaacaacggcagagcaagcagccagaaaaatggtgttgctgtccaaagcaacaacagaacaatactcctacatcaagaactacatgccaactgcattctcctcaacaattcccatagtggacctctccaaacccgatgcaaagaccctcatagtgaaggcttgtgaggagtttggattcttcaaagtcatcaaccatggtgttcccattgaagctatatcccaattggaatccgaagccttcaagttcttctctatgccactcaatgagaaggaaaaagcagggcctcccaaaccatttgggtatggtagcaagaaaattggacacaatggggatgttggttgggttgagtaccttcttctcaacaccaatcaagaacacaacttctctttttatggcaaaaatgctgaaaaatttaggtgtctattaaacagttacatgtcttctgtgagaaaaatggcatgcgagattcttgagttgatggcagaaggattgaagattcagcaaaagaatgtgtttagcaagcttctgatggataaacagagtgactctgttttcagggtgaatcactaccctgcttgtcctgaacttgccgtgaatggtcagaacttgattgggttcggagaacatacagacccacaaatcatttctttacttaggtccaacaacacttcaggccttcagatttttcttagagatggaaactggatttcagtcccacctgatcacaaatctttcttcataaatgttggtgattctcttcaggttatgaccaatggaagatttcggagtgtgagacatagagttttggcaaatggatttaagtctaggctctcaatgatttactttggaggtccacctttgagtgaaaaaatagcgccattaccttctctcatgaaaggaaaagaaagcttatataaagaatttacgtggtttgagtacaagaattcaacctatggttcaagattggctgataataggcttggacattttgagagaattgttgcttgataatatgtagagaattatgggggcacttgtcaatacaaaatgggggttacaatagtctatatactataaatgttttttctttttcttttttctactttaaggttatttatcaattagaatgcctcacagatataggacaacgcatacaccccttttgcttcaacactagtgaatgcatctgatgtagttaacaatggagatttgataatggtcaaaagcttgatacaaattgcaataaagctttataagaataaaatatatattccag

SEQ ID NO: 219 - DNA, 1264 bp, Glycine max
gttcgtaacgcctctttcttacctctcattcatgcattagcaatatttctcaatctctcttcttacccatttcctccccccctctttctcttttcttgttctgtttttattttcactgttctctgataacaacgttgttagttgtcaccatggttgttctgtctcagccagcattaaaccagtttttccttctgaaaacatgcaagcccacgcccttgttcgcggggattcctgtggtcgacctcacggaccccgatgccaagacccacatagtcaatgcctgcagggacttcggcttcttcaagctcgtgaaccacggtgttccgttacagttcatggccaatttggaaaacgaaaccctcgggttcttcaaaaaacctcaatccgagaaagacagggctggtccccctgacccttttggctacggcagcaagaggattggccctaacggcgatgtcggttgggtcgaatacctccttctcaacaccaaccctgatgtcatctcccccaagtcacagttcattttcagagaaggtcctcagaatttcagggcggtggtggaggaatacattagagcggtgaagaacatgtgctatgaggtgttggaattgatggctgagggattggggataacgcagaggaatgtgttgagtaggttgctgaaggatgagaagagtgattcttgcttcagacttaaccactacccgccatgcccggaggtgcaagcattgaacggaaggaatttggttggatttggagagcacacagacccacagataatttctgtcttgagatctaacagcacctcaggcctgcaaatctgtctcacagatggcacttgggtttctgtcccacctgatcaaacttcctttttcatcaatgttggtgacactcttcaggtaatgactaatgggaggtttaaaagtgtaaagcatagagttttggctgacccaaccaagtcaaggttgtcaatgatctactttggaggaccacccttgtgtgaaaagatagcacctttaccttcactcatgttaaaaggagaagagagtttctacaaagagttcacatggtgggaatacaagaaggctgcgtacgcgtcaaggctagcggataatagactcggcccttttgagaaatctgctgctgattaaggaggcaaagtgtgtcaaaattctactactcaattttggcacgtgttgttaggccaacttttttattttttattttttttgggtgtgtgtatctaggttccaaacagttgact

SEQ ID NO: 220 - DNA, 1400 bp, Glycine max
ttgctcagagcctcattaagttttttctcttatacttattcattgactctccaaaagccctttaaacctctctattcctctctcacgtaccctcttccttccattcactccacttcttaactccccaaaacagaaagcagcaagaaaaatggtgttgctgtccaaggcaacaacagaacaatactcctacatcaagaactacatgccaacggcattctcctcaacaattcccgtagtggacctctccaaaccagatgcaaagaccctcatagtgaaggcttgtgaggaatttggattcttcaaagtcatcaaccatggtgttcccatggaaactatatcccaattggaatctgaagccttcaagttcttctctatgccactcaatgagaaggaaaaagtaggccctcccaaaccatatgggtatggtagcaagaaaattggacacaatggggatgttggttgggttgagtaccttcttctcaacaccaatcaagaacacaacttctctgtttatggcaaaaacgctgagaaatttaggtgtttgttgaacagttacatgtcttctgtgaggaaaatggcatgtgagattcttgagctgatggcagaaggattgaagatacaacaaaaaaatgtgtttagcaagcttcttatggataaagagagtgactctgtttttagggtgaatcactaccctgcttgccctgaacttgtgaatggtcaaaacatgatagggtttggagaacacacggacccacaaatcatttctctacttaggtccaacaatacttcaggccttcagatttttcttagagatggaaactggatttcagtcccacctgatcacaaatctttcttcataaatgttggtgattctcttcaggttatgaccaatggaaggtttcgaagtgtgaaacacagagttttgacaaatggatttaagtctagactctcaatgatttactttggaggtccaccattgagtgagaaaatagtaccattatcttcacttatgaaaggaaaagaaagcttatacaaagagtttacgtggttcgagtataaaaatttaacctatgcttcaagattggctgataataggcttggacattttgagagaattgttgcttcataatatgctaaaggattacgggggcatttgtcaatacaaaatggggggttacaatatatagtctatgtactatatatgttttttttttttcaactttaaggttatttatcaattagaatgcttcatagacgatagaatatataccccttttgcttttgcttcaacactagtggatgacgtctgatgtagtcaacaatggagatttgttaatgattaaaagcttgattcaaattgtaataaaacattataagaataaagtatatattccatgcac

SEQ ID NO: 221 - DNA, 1270 bp, Glycine max
ctgtattgttcgtaacgcctctttcttacctctcattcatgcattagcaatatttctcacccatttcccccatttaaaaccccctacacccccaccacccttcactccctccctctctctctctctctctctctctctgatagcaacgttgttagttgttacaatggttgttttgtctcagccagcattaaaccagtttttccttctgaaaacatgcaagcccacgcccctgttctccgggattcccgtggtcgacctcacggaccccgatgccaagacccacatagtgaaggcctgcagggacttcggcttcttcaagctcgtgaaccacggtgttccattagagttcatggccaatttggaaaacgaaaccctcaggttcttcaaaaaacctcagtccgacaaagacagggctggtccccctgatccttttggctacggcagcaagaggattggccctaacggcgatgtcggttgggtcgaatacctccttctcaacaccaaccctgacgtcatctcccccaagtcacagttcattttccgagaaagtcctcagaatttcagggtggtcgttgaggagtacattagagcgctgaagaacatgtgctatgaggtgttggaattaatggcggagggcttgggaataactcagaggaatgcgttgagtaggttgctgaaggatgagaagagtgattcttgcttcagacttaaccactacccgccatgcccagaggtgcaagcattgaacggcagaaatttggttgggtttggagagcacacagacccacagataatttctgtcttgagatctaacagcacctcaggcctgcaaatctgtctcacagatggcacttgggtttcagtcccacctgatcaaacttcctttttcatcaatgttggtgacactctacaggtgatgactaatgggaggtttaaaagtgtaaagcatagagttttggctgacccaaccaagtcaaggttgtcaatgatctactttggaggagcacccttgagtgaaaagatatcacctttaccttctctcatgttaaaaggagaagagagtttctacaaagaattcacatggtgggaatacaagaaggctgcgtatgcgtcaaggctagcggataataggctcgctccttttgagaaatctgctgctgattaaagagtccaagtgtgtcaaaattttactgctcaattttggcacgtattgttagggaactttttcatatatatatatattttttggtttgtatctaggtttcaaaca

SEQ ID NO: 222 - DNA, 1431 bp, Glycine max
atgacttcctttgctcaaagccaaaccaaattttctctctttcacttatttattgactccccaaaagcttttcaaatatctctgttcctctctcacgtaccttctccctatctttcactccacttcttaacaccacaaaacagaataacggccgagcaaacaacaagaaaaatggtgttgttgtccaaagcaacaacagaacaatactcctacattaagaactgcatgccaaccaaattttcctcaacaattcccatagtggacctctccaaacctgatgcaaagacccttatagtgaaggcttgtgaggagtttggattcttcaaagtcatcaatcatggtgtctccatggaagctatatccgaattggaatatgaagccttcaaattcttctctatgtcactcaatgaaaaggaaaaagtaggacctcccaatccatttgggtatggtagcaagaaaattggacacaatggggacgttggttggattgagtaccttcttctcaacaccaatcaagaacacaacttctctgtttatggcaaaaaccctgagaaattcaggtgtctgttgaacagttacatgtcttctgtgaggaagatggcatgtgagattcttgagttgatggcagaagggttgaagattcagcaaaaggatgtgtttagcaagcttctaatggataaacaaagtgactctattttcagggtgaatcattaccctgcttgtcctgaaatgactctgaatgatcagaacttgattgggtttggagaacacacagacccacaaatcatctctctgttaagatccaacaacacttcaggccttcagatttatcttagagatggaaattggatttcagtcccaccagatgacaaatccttttttattaacgttggtgattctcttcaggttatgacaaatggaaggttccgaagtgtgagacacagagtgttggcaaatgggttcaagtccaggctttcaatgatttactttggaggtccacctttgagtgagaaaatagcaccattatcctctctcatgaaaggaaaagaaagtctatataaagagtttacctggtttgagtacaaaaaatcaatctacggttcaagattatctaaaaatagacttgaacattttgaaagaattgcagcttcgtaatatatattctagagaattgtttgagacacttgtcaatacaaaatgggagattacaatatgtagtttgtatactataaatgctttttttttttttttttttacttttaaggttatttatcaatcagaaggcttcatagacatgataacatatgtatccattttgtttaaatgctagtgaatgacatctaatgttgttatcaagggacatttgttaatggtcaaaaacttgacacaaattgcagtaaagcattataagaataaagttatattctatgc

SEQ ID NO: 223 - DNA, 1005 bp, Glycine max
atggttgttctttctcaccaatcagcactaaacgagttatttctcgtgaaaacatgcaagagcacgttcataggggtgcctgaggttgatctcacgcaccccgaggccaagacgaccatagtgaaggcatgtcaagagttcggtttgttcaaggtggtcaaccatggcgtgccgttggagttgatgacccatttggagaatgaagcgctcaagttcttcatgcagccacaatctctgaaagacaaggctggtcctcctgacccttatgggtatggaagcaaaagaattggcaccaacggtgatctgggttgggttgagtatctactcctcaacaccaaccctgatgttatctcccccaaaacacttcaactttttgaacaaaacccagaaatgttcaggtgtggagtggaggaatacataggggcagtgaagaagatttgctgtgaagcgttggagctaatggcagatgggttggaaatagtaccaaggaacgtgttcagcagaatgataagggacgagagaagcgatagttgcttcagaatgaaccggtacccagaatgtccagagcttaaggtagaagctttgagtggtcgaaatttgactgggtttggagaacacacagacccacagataatatctgtactgagatccaacaacacatcaggactgcaaatatgtctcccagatggagatggagatgggactacttgggcttcaatccagcctgatcacacttcctttttcatcaacgttggtgatctcttgcaggtgatgacgaatggaagctttaaaagtgttaagcatagggtattagttgattcaagcatgtcaagactttcaatgatttactttggaggaccacctttaaatgaaaagattgcacctttaccttcactcgtgtcaagggaagaagagagtttgtacagagagttgacatggctggaatacaagaatgctgcatacaagtcaaaactctctgataataggcttagtctctttgataaa

SEQ ID NO: 224 - DNA, 1029 bp, Glycine max
atggtgttggcttccccaaactcaataaggagcgaagggattctacccagcaacgagcttattcccgttgtggacctaacagcagaaaggtcacaagtgacaaagctcatagtgaaagcgtgcgaagagtacggtttcttcaaggtgataaaccacggtataagccacgaagtgatatcaaaaactgaagaagcagggtttagtttctttacaaaaccggtggcagagaagaaagtggcagcacctgcatatgggtgcaagaacatagggttgaatggggacatgggtgaggtggagtaccttctcctcagtgccaccactcactccatttctcagatatccaaaactatatccactgacccattaaacgtcaggtgtgacacaattgtgacaagtagtttgagtttttttaactctacattgagtgcatacacagaagcagtgagggagctcgcatgtgagatattggagctaatagcagaggggttgggggtcccggacacttggatattcagcaggttcataagggatgttgacagtgactcagttctaaggctcaatcactacccacctataattaacaaggacaacaacaaagacatgtcacaaaaatttaccaaggttggctttggagagcattctgatcctcagatcataaccattctcagatccaacgaagtgggtggcctccaaatttcccttcaagatggggtctggatcccagtcacccctgacccctcagcattctatgtgaacgtgggtgatgtactagaggttatgacaaatggaagatttgtaagcgtgagacacagggctatgacgaactcatacaagtgtagaatgtcagtggcatattttggggctccacccctccatgctaccattgttgctccctcagttatggtcacacctcagaggccctctctcttccgaccattcacttgggccgaatacaagaaagcaacttactctctcaggcttggagacacacgcattcaacttttcacaaataaactaaaccactcatga

SEQ ID NO: 225 - DNA, 1575 bp, Oryza Sativa
atggctgcaaggtgttcgatcgcgttcatgatcatggcgagctgcctgtccgtcgtcgtctccggtgggcttcccggcgatctcttcgcgctcagtgtcgcctcgaagctccgcgtcgaccgcaactcgacggcgagggcgtcgtcggacttcggccgcattgtggccgccgcgccggaggcggtgctccacccggccacgccggccgagatcgcggagctcgtccggttctcggcgtcgtcgccgtcgccgttccccgtggcgccgcgcgggcagggccactctgcccgcgggcagtcgctcgccccgggcggcgtcgtggtcgacatgcgcgcgctggcgtcgcgccgcggccgcgtcaacgtgtccgcgggcgcggcgccgtacgtggacgccggcggcgagcagctgtgggccgacgtcctccgcgcgacactggaacacggcctggcgccgcgcgtgtggacggactacctccgcatcaccgtcgccggcacgctctccaacgccggcatcggcggccaggcgttccggcacggcccgcagatcgccaacgtgctcgagcttgacgtcatcacaggaacgggtgatatggtgacgtgctcaagggacaaggactcggacctgttcttcgcggtgctgggtgggctgggccagtttgggatcataacccgggctcgcattgggctcatgccggctccgaagcgggtgcgatgggtccggctcgcctactcggatgtggccacgttcactaaagaccaggagctgcttatatcaaaacgggctagcgaagccggcttcgactacgtcgaaggacaagtccagctcaaccggacactcaccgagggtcccaagtcgacgcccttcttctctagcagcgatattggcaggcttgctggacttgcctcgaagtctgtgtcaggagtgatctacgtaatcgaaggcaccatgtattacaatgagtcaaccagcaccactatggatcagaaattggagtcaatactagggcagctaagctttgaggaaggcttcgtgttcacaaaggatgtgagatacgtgcaattccttgatcgtgtgagggaggaagaaagggtgctccgatcgatcggcatgtgggatgttccgcacccatggctaaacctcttcgtccctcgatcacgcatccttgactttgatgctggtgtgtttaagggtgtcttcgctggtgccaaccctgttggcgtcatcctcatgtatcccatgaatacgaatatgtgggatgactgtatgatggcagtggccagcgacgatgatgtgttctacgctgtggggttgctccgttctgcggcagttattggtgatgtggaacgcctagagaaagagaacgaggcggtgttggcattctgccataatgaggacatcgggtgcaagcagtatctgccatattacacatcacaagatgggtggcaacgccatttcggtgctaagtggagcagggttgccgatctaaaggcgaagtatgacccacacaggatattgtcaccaggacagaggattttctcatcaccagcatcaatggtggtggtgtctatgtag

SEQ ID NO: 226 - DNA, 1587 bp, Oryza Sativa
atgatgcccagagctcagttaaccacatttctcatcgtcactagcttcctctctactgtcccctatctcagggcaccggtgcatggtggcgtcctcactagttacgatgtttcttctttggatatcatgtccaaaatccacactgatcatgacgcgactaccaaggcatcatcggactttggccatattgtacatgctacaccaaacggggtatttcgtcctaccttccctgctgacatcgctgccctaatccgcttatcactctctcagccgacacccttcaccgtggcaccacgaggcaagggccactcctctcgaggacaggccttcgccccgggcggcattgttgttgacatgtcggctctcggtgatcacggtcaccataccagtcaccgtatcgacgtgtcggttgataggatgtatgtggatgccggtggcgagcagctatggatcgacgtgctccacactgccctcaagcatggtctcacgccacgtgtatggaccgactacctccgcatcaccgtcggtggcacgctctccaacgccggcatcggtgggcaggcattccggcatgggccacagatctccaacgtccacgaacttgatgtggtgacaggaatgggtgagatgatcacttgctcaccagaggtgaactcggccctgttcttcgcggtgctaggtgggttgggtcagtttggggtcataacccgggccagaatcagacttgaaccagctccgaaaagagttaaatgggttcgaatcgcttactcagatgttcacccatttactaccgaccaagagttgcttatctcaaaatgggctagcggatctgggttcgattacgttgagggccaggtccagctcaatcggaccttgacccaaggccgcaggtcgtcttccttcttctctgcaaccgaccttgctcggctcactgggcttgccattgatactggatccgtagcgatctattacattgagggagcaatgtactatgacgataacaccgccgcttccgtggatcagaaacttgatgcgctactggaggagctgagcttcgtccggggcttcgtgttcgtcagggacgcatcgtacgtggagttccttgaccgggttgggcgggaggagcagaatctccggtcagccggcgcctgggacgtgccccacccatggctcaacctcttcgtccccaggtctcgcatcctccacttcgacgccgccgtcttcaagggcatcctccgcaacgccaaccccgtcggcctcatcctcatgtaccccatgaataaggacatgtgggatgacaggatgacggcgatgacgccggacgaggacgtgttctacgccgtcgggctactgaggtcggcggtggccggtggcagcggcggcgacgtggagcagctggagagggagaacgcggcggtgctggagctctgcgacctcgccggcggcggcatcgggtgcaggcagtacctgccgcaccacgcgtcgcgggacgggtggaggcgccacttcggcgcgaaatggggcagggtcgccgacctcaaggcccggaggttaatttgcgagggtgctgaatggtttggtttgtaa

SEQ ID NO: 227 - DNA, 2176 bp, Oryza Sativa
cgggtcacctgcctcctcctgccgtgccacaaaaagcaaggcaaagcagcagcgaggaggcgagacagattcccaaatcccgcacaaccccaccccgaatccaccaccccacgccaagcccgctcgccgccgccgcccgagcgcgcgcgcgtacgggcacggcgggcgtacgacgccggaggtggggatcgagcgtgccccctcctccgtcgcggcgggcgacgtcggacgtcgtcggtcgtagcttgccttcgtttcgttgtcgggttttcggtgctgctgctgctgctggtggtggtcgagcaaaggccggtggcggatcgccggcggtcccgtccgcgggaggggcgcgggtgacgcggtgatcagataaaagtgtcccttccaacattgccatttggagctctatgggttggttgaccaaattttttagaggttcaacccacaaaatctcggaagggcaataccacagcaaacccgcggaggagacgatatggaatggaccctctaattccgcagttgtgacggatgtcccgtcagaatttgacaatgaagatatcgctcgtgctatatcactctctctattagaggaggaacaaagaaaggcaaaggcaatagaaaaggacatgcatttggaggaggatgaacaacttgcaagagctatccaggaaagtttgaatgttgaatcgcctcctcgtgctcgtgaaaatggcaacgccaatggtggcaatatgtatcaaccactgccatttatgttttcttctggattcaggacttgtgccggatgtcacagtgagattggtcatgggcgtttccttagttgcatgggagctgtttggcatccagaatgttttcgctgtcatgcttgtaatcaaccaatatatgactatgagttctccatgtcgggaaaccatccataccataaaacatgctacaaggagcgctttcacccaaaatgtgatgtctgcaagcaatttattcctacaaatatgaatggcctgattgaatatagagcacatcctttctggttacaaaaatactgtccatcacatgaggtggacggtactccaagatgctgtagttgtgaaagaatggagccaagggaatcaagatatgtattgctggacgatggtcgcaaactctgcctggagtgccttgattctgcagttatggatacgagcgagtgccaacctctttatcttgaaatacaggaattttatgaaggcctaaatatgaaagtggaacaacaagttcccttgcttcttgtagaaagacaggctttaaatgaagccatggaaggagagaagactggtcaccaccatcttccagaaacaagaggtttatgcttatcagaagagcaaactgtcagcacgatattgaggagaccaagaatggctggaaataaagttatggaaatgataacggagccatataggttgactcgtcgatgtgaagtgactgcaattctcattctttatggtctcccaagattgttgacaggttcaattttagctcatgagatgatgcatgcgtggttgcgacttaaaggatatcgcacacttagtccagacgtagaagagggcatatgccaagttcttgctcacatgtggattgagtcagagatcattgcaggatcaggcagtaatggtgcttcaacgtcttcatcctcatcagcatccacatcatcgaaaaaggggggaagatctcagtttgagcgaaagcttggtgattttttcaagcaccaaattgagtcagatacctcaatggcctatggcgatggttttagagctggcaaccgagctgttcttcagtatggtctaaagcgcacccttgagcatatccggttaacagggactttcccattttgaaatttcatagattcgtcttttgatggaagttatacacgatcgatttgtcattaagcgtccatttacaggaaaagaaagcaattttgagatgtgcaattgtacaaacaatcttttcagttacttttggaagggctaactgacgacattgattaaattgtgatatggttagcccaaccaatcacacatgtatggcattcagaaattctaatggaaacagcggtattttttatgtgacaaaaattaataagaaatttatactaccatgtacaagtgagattctaatggaaacagtagtatgttttatggtt

SEQ ID NO: 228 - DNA, 1803 bp, Oryza Sativa
atgaggccatcactcttgcagtatctgaagctgctcctgttacttgcccttggtggtgtcaccaccatgcatgtgcctaaacaagatgtgccatcatccctggaggaactcacccttgatggccatttcagcttccacgatgtgtctgctgctgcacaggactttggcaacctgtccagcttcccgccggttgcggtgcttcatcctggctcagtggctgacattgccacaaccatcaggcatgtgttcttgatgggtgagcactccacgctcacagtggcagcccgtggacatgggcactcgctgtatgggcagtcccaggctgctgagggaatcatcatcagtatggaatccctccagagtaacacaatgagggtgaaccctggcgtatcaccctatgtcgatgcttcaggaggagaactctggataaatgttttgcatgagactctgaagtatggtttagcaccaaagtcgtggacggactatctccatctcacggttggaggcacactgtcgaatgcaggagtcagtgggcagaccttccggcatggcccacagatcagcaatgtcaacgagctggaaattgtgactggaagaggtgatgttatcacatgctcacctgaacaaaactctgatctcttccatgctgcccttggtggcctaggtcagtttggcgtcatcacaagagccaggattcctcttgaacctgctccaaaaatggtaaggtggctacgagttctctacttggatttcacaagcttcaccgaagaccaggaaatgctcatttcagcagagaagacatttgactacatcgagggctttgtcatcataaataggacaggcatcctgaacaactggaggtcgtccttcaatccgcaggacccagtgcgttctagccagtttgaatcagatggaaaagtgctcttctgccttgagatgacaaagaacttcaaccctgacgaggctgatgtcatggaacaggaggtcaacacactgctgtctcaacttagatatatgccttcctccttattccacacggatgtaacatacatagagttcttggatagggtacactcttctgagatgaagttgagagctaagggcatgtgggaagtcccacacccatggcttaatatcatcattccaagaagcatgatccataaatttgcgaaggaggtctttgggaaaatcctgaaagacagtaacaatggtcccatattactctatccagtgaacaaatccagatgggacaacagaacatcagtagtcataccagatgaggaagttttctacctggtggcattcctatcctcagcacttggcccccataacatcaaacatacattggacctgaactacaggataatagagttctctgacaaggcaggtattggagtgaagcagtatctcccaaactataccacagaacaggagtggcagtcccattttggtgcaaggtgggacacatttcaacagaggaaaaaagcctatgaccccttggccatcttagctccaggacaaagaatatttcaaaaggcatcagcgtcactacccttgccctcatgacagtatctaatgtaaatatttatttcctgggagcaaacgtttgtagtttgtacagaactgtaggtaaaatttcttttacaaaaggcaattaactgtagcatgggcaacacagtttactaactactgaatatcagcagtgaactagtggtgcactcatgaacattctcatcaagaagattaaaggagagcagcattgccttacttccaattttctatgaagctctttggaagcaataa

SEQ ID NO: 229 - DNA, 2502 bp, Oryza Sativa
ccgccgcgcgcgcgggcgcacaagcgagacgtcaccgcgccacctgtgcgggcacgaggtggacgtcacccttttttctttgacccaggcgcagaggcaccaggccagcaagtccgcctcctccttcccgtccatgtcacgcttccttcacctcccttgtcctctttcccctccccctggattcctacctgtcgcctcgccggctcaagggtctctctcgcgtctccgtctcatcccttctcgcctcttattattcttcttcttcttttctttatcctgtggaaggcgttcttgggtggggagagatcaagaaccggagctgtccgtggccggtggttcgcctgtcccgagctcgattagttaccctttgtctcggttcttggtgcgtggtcaatcgggactacagagaattggagtttcttgtgggagtttcagggtcacttcgaggtgaaagcggactgagcgggaggcgaggcgatcgacggcgaactgaattcctagtttgttgcaggctcaagctttggttttctgaagtactggaaacgttctcgattggcgaaaagtttgtgagatttttgtcttctggctacagaaaattcgaccctcagataacctcgagtcatgggttggttaaataaaatatttaaaggttcagtaaatagagtttcaaggggccattatgatggaagctggcatgaaggtcattcatcagataacgccagaggagcgtatgatgaaagtgataatgaagatatagatcgtgctattgcactgtctttatcagaagaacaaaataagggaaaagctgttgatatcgattataatttggaggaagatgaacaacttgcacgagctctccaggagagccttaatgctgactctcctccacgtcagaatattcctgttgagaatgttccatcagagcccccaagagagctgcctccgattctatttgcctcaagtggatccagaacttgtgctggatgcaaaaacccaattggtcatggacgttttcttagctgtatggattcagtatggcatcctcagtgcttcaggtgttttgcttgtaacaagcccatctctgagtatgagtttgctatgcatgaagatcagccataccacaaatcatgctacaaagattttttccatccaaaatgtgatgtctgcaagaactttattccaacgaacaggaatgggctgatcgaataccgagcacatccattctggatgcaaaagtactgtccttcccatgaagatgatggcactcctaggtgttgcagttgtgaaagaatggagccgatggacatcaaatacatcacattagatgatgggaggaaactctgcttggaatgtctcaattcttcaataatggatacaccagagtgtcaacagctgtatatggacattcaggaattttttgaaggtctgaacatgaaagtggagcaacaagttccaatactcttggttgagagacaggctctaaatgaggctttagaaactgagaaaaatgggcatcatcttcctgaaacaaggggactatgtctttctgaagagcaaattgtcagaacgatcttaagaagaccaataattggaccgggaaacagaattatagatatgatcacagcaccatataagctggaaagacgatgtgaagtgactgcaatcctgatattatatgggttgccgagattacaaactggctcaattctcgcccatgaaatgatgcatgcttatctacgtctgaaaggatttcggtctcttagtcctcaggttgaagaaggcatatgccaagttctttcccacatgtggctcgagtcagagatcatctttggttctagtatcgacatatcagccacctcagtggcatcttcgtcgtcgtcatcttcaactccaaccacatcaaagaagggcgcaaagaccgaattcgagaagaagctcggagcattcatcaaacatcagatcgaaacggattcatctgaggcatacggagatggttttcgagctgccaatcgggctgtcgaaagctatggcctgagaagtacccttaatcatatgaaaatgacagggtctttcccatattgatcattcctcaattgtgaggattgatgcatatttggagattattggagttacatataccctcatcatggtagcattaatttacagtaaattgagaaaagaaagaagaggattgaataggacataaattgcaccaatgctttcttgttgtctttgaaataatacatgtaagtcttcctatagagaggttttatagtttttcacagtgaacacatccttggaaaagaacaggcaatcagaagataattttgctgagttatgtacttatgtaacaccttttgtatctgaatgtatttatttcattcactccaataatttcatttttatttttgaaggaatgaaaccaatggtaatgtataaatatttgacgtttggataagattccatcaaactgttgaaaatacatatcattaatagtttctc

SEQ ID NO: 230 - DNA, 2490 bp, Oryza Sativa
attccatctccccccaatcgctcgggcgcaatgcgcagcagcagcagcaaggccacacccacaacctcccctgcttttcgcgtcctctgctctcctcctaggttagcagcggctttgccaacgagatagataggcaaaagagaaagtacttgcatagcccaacaaggcaacagctgctgctaccctctctttcttttctctgcttctccttgctctctcttctcttcctttctttctttctatctcctgcagtgccaagagtccaagacccaacaagggggaggacggaggaggcgaggcagaggcatctcaccgaagggggaagggcgacgccatgtgggacctcaatgactcgccggcggccgaggccgcgccgccgccgctgtcgccgtccgccgacgactccggcgcctcctcgtcctcggccgccgccgtcgtcgagatacccgacgacgccgacgacgactcggccgctgtggttgtcgtcacgcgccagttcttccctccggccgtcccgggcggcggcggcgaccccgcccccgggaacgcgcgcgccgggtggctccgcctggccggagccgccccgccggtcgctgcaacggggccggcggcgtcggcggcggtgtccaagaagagccggcgcgggccgcggtcgcgcagctcgcagtaccgcggcgtcacgttctaccgccgcaccgggcgatgggaatcgcacatatgggattgtggcaagcaggtctatttgggcggatttgacactgctcatgcggcggctcgggcgtacgatcgggcggcgatcaagttccgcggcgtggaggccgacatcaatttcagcttggaggattacgaggatgacctgaagcagatgagcaacctgaccaaggaggagttcgtccacgtgctccggcggcagagcacggggttcccccggggaagctccaagtacaggggcgtgacgctccacaagtgcgggagatgggaggctcggatgggccaattcctcggcaagaagtacgtctacttggggctgttcgacaccgaggaggaagctgccagggcgtacgaccgcgctgccatcaagtgcaatggcaaggatgcggtgacgaacttcgatccaagcatttacgccggggagttcgagccgccggcagcggccacgggtgatgccgccgagcacaacctggacctctcgcttgggagctcggcgggctccaagaggggcaacgttgacggtggcggggacgacgagatcaccggcggcggtggcggtggcgcgggctccgaccagcgcgtccctatggcgttcgaccttgactggcaaacggcggcggcgaggagcaccaaagctaagttcgaccagaactcgaaccatccccagatgcctccggtcctgcaggtcacccacctgccattcagtcccaggcatcatcaccaattcttgagcaatggtgatccggggacagcgggaggcctgtcactgacgatcggcgcaggcatggccgggcactggcctccccagcagcagcaggggtggggcaacgccggcggcatgagctggccgcacccgccgcacccgccgccgccgccgaccaacgccgcggccgccgcaaccgctacagcagctgcagcatcatcacgattccctccctacattgcgacgcaagcctcaacctggctgcagaagaacgggttccattccctgacccggcccacctaagatgatcaaagatttaaaattcaagatcgctgcattcatcgtctcctcgtcgatcgatcatggcaaagatcgatggagagagagaggtgtgtgtcactgacgcagggaaaaactcaatgcagatttaccagcaagaacaagagctggatgctattcttttgctctaccttttttcttctctctttcttcttctctgtttcttgattgggcgagcgagatggagatggatctgatcatgaatgggacacaagtgggcatgtaaatgaggagctccctagaaggcgagagagattggccaagcgtcgcctcaagcagtgtaggagtatctatcttttgccgtttcgctcgctttctttccttcttttctttcaccatggccaacaacgatgactctgggtgtcaacatcacagctcattttgttcggtctcatgttgcatcattcactgcatgatgaccatgattcgggaaaatttgctccatgcacctccgcttggccgacaacacttgccctctagtaagcatccttaaacacccacggtttctactactattcatcgctttataaatcctacggagtgctagctttacgctactactactgtcatgtaatctatcatcatcaaaagagacgatcagattaacatatatgtcaactatttaagctttggctctttgctttccaagaaacgtaactgccgagatgtggagcatatagaagtattcgtccttctagatgttggtactaaagtaatgttctttcttttctccctct

SEQ ID NO: 231 - DNA, 1599 bp, Oryza Sativa
atggcggcgatttacctgctgatcgccgcgctgatcgcctcctcccatgcactcgccgcgcatggcgccggcggcggcgttccgttggcggcggcggcgcctctcccgttccccggcgacctcgccgcgtccggcaagctccggaccgacccgaacgccaccgtgccggcgtcgatggacttcggcaacatcacggcggcgctgccggcggccgtgctgttcccgggctcccccggcgacgtggcggagctcctgcgcgccgcctacgccgccccggggcggccgttcaccgtctcgttccgcggccgcggccactccaccatgggccaggccctcgccgccggcggcgtcgtcgtccacatgcagtccatgggcggcggcggcgcgccgcggatcaacgtgtcggcggacggcgcgtacgtggacgccggcggcgagcagctgtgggtcgacgtgctccgcgccgcgctggcgcgcggcgtggcgccgcggtcgtggacggactacctccacctcaccgtcggcggcaccctctccaacgccggcgtcagcgggcagacttaccggcacgggccacagatctccaacgtgctcgagctcgacgtcatcaccgggcatggcgagacggtgacgtgctccaaggcggtcaactcggacctgttcgacgccgtcctgggcgggctgggccagttcggcgtgatcacgcgcgcgcgcgtcgccgtcgagccggcgccggcgcgggcgcggtgggtgcgcctcgtgtacgccgacttcgccgccttctccgccgaccaggagcgcctcgtcgcggcgcggcccgacgggtcgcacgggccatggagctacgtggagggcgcggtgtaccttgccggccgcggcctcgccgtggcgctcaagagctccggcgggttcttctccgacgccgacgccgcgcgcgtcgtcgcgctcgccgcggcgaggaacgccaccgccgtgtacagcatcgaggcgacgctcaactacgccgcgaacgcgacgccgtcgtccgtggacgcggcggtggcggcggcgctcggcgatctccacttcgaggaggggttctccttctcccgcgacgtcacctacgaggagttcctcgaccgggtgtacggcgaggaggaggccctcgagaaggccgggctatggcgcgtcccgcacccgtggctcaacctgttcgtcccgggctcccgcatcgccgacttcgaccgcggcgtcttcaagggcatcctccagacggccaccgacatcgccggacctctcatcatctaccccgtcaacaaatccaagtgggatgcggcgatgtcggcggtgacgccggagggggaggaggaggtgttctacgtggtgtcgctgctgttctcggcggtggcgaacgacgtggcggcgctggaggcgcagaacaggaggatactgaggttctgcgacctcgccgggatcgggtacaaggcgtacctggcgcactacgacagccgcggcgactgggtgaggcattttggcgccaaatgggatcgcttcgtgcagaggaaggacaagtacgaccccaagaagctgctctcccctggccaggacatcttcaactga

SEQ ID NO: 232 - DNA, 1379 bp, Oryza Sativa
ggacaagaggacgacagcacgcgagccacagaagatctcgtctccctccctccctccctccaccctctcccccctcccctccccttctcgccaccgccaccgccaccttagccgcgcgaggcattgccctcctcctgcgcggccgccccccacgaccgcggcggaggctgctccggctggggcgggatcgacgacgactgattcggttcatgatccatcagaaggaatgaacgggagtcggcagatggagctgcactacataaatactggatttccatacaccatcaccgagagcttcatggatttctttgagggcctcacatatgctcatgctgattttgctattgcagatgctttccatgatcaggctaatccatactgggcaatgatgcatacaaactcgtacaagtatggatattccggtgcaggaaattattacagttatgggcatgtttatgatatgaatgattacatgcatagggcagatggtggacgcagaatctgggataatgctacacctgtaaacaacactgaatccccaaatgtagtcttgcagggtggagaaactcctcatgcaaatacaagctctactactgaggaatgtatccaacaacaagtacaccagaattcgagcagtccacaggtcatttggcaagacaacattgatcctgacaatatgacatatgaggaattgttggatttgggtgaggcagttggaacccaaagccgtggtctctcccaagaacgcatttcattacttccagtcaccaagtacaaatgtggtttcttttcaaggaagaaaacacgccgtgaaaggtgtgtaatttgccaaatggagtacaggagagggaatctgcagatgacgcttccctgcaagcatgtgtaccatgccagctgtgtaacaagatggcttagcataaacaaggtttgccctgtttgctttgctgaggttcctggtgacgaacccaagaggcaatgagtcaaggccgccaaaatgttcttgcgcccagactcagcccacactgtaccccaacggatgcatgatttctgcttgaaggcagctttcccctttctctctagatttgtgtattagaatcatatcgcaaatataggttataaccagatgtagttggatcttggaacctgttctgagaggtttgccgtagactgtagagttcgaatgtgaagtgtaaccctgtgctagatgaagcatgctggatcacgcgcgcttgcgaggtgtttttgtccactgcaaagagcattgcactagcctgtgttatttgaattcaattaagattttgtggacagaaaaaattcatttgttacatcccctgcttttagcctgtcaatcacagtatgtcccctgtttttcccatgaa

SEQ ID NO: 233 - DNA, 1251 bp, Oryza Sativa
ccctaccctttctcctccaccctccaaatccacccggggtccccctaccattttaaccccgcggccttagccgctaatgctccgcgtttgaaatcgctaagcgcacccgaaaccctagccccctcccctcccgagtcccgaccgccatgggcaagtacatgcgcaaggccaaggtggtggtctccggcgaggtggtggccgccgccgtcatggagctcgccgcggcgccgctcggggtgcgcacccgcgcccgctccctcgcgctgcagaagaggcagggcggggagtacctcgagctcaggagccgcaggctcgagaagctccctcctcccccgccgccgccgccgaggaggagggcgacggctgcggctgcgactgctgatgcgacggcggcggagagcgcggaggcggaggtgtcgttcgggggggagaacgtcctcgagctggaggccatggaaaggaataccagggagacgacaccttgcagcttgatcagggaccccgatacgattagcacccctggatctaccacaaggcgcagccactcgagttctcattgcaaggtgcaaacacccgtgcgccacaacattattccagcatcagcagagctggaagcgttcttcgctgccgaagagcaacggcaacgacaggctttcatcgacaagtataactttgatcctgtgaatgactgccctcttcccggccggtttgaatgggtcaagctagactgatagattttcaggaaaagaagggcaccatggacctctctgctccctccacagtagtagcgtggcagaggcgcttaccgtcaagttagctttgatcctgttgtaaaaatttagggttagcctgtagactcaatggtcaatgtgaacatacagaactgatgctgagttacaaccctaatccctcaactacaatgtaacccttaacagctcattctgtaaggaaccacctcctcctctagggcctagctagccttatcatctgttattaccagttgctggattaatgaagttagatctagatattgtgtcacagtttaacctgttctgtgtgtggtggtagcattggcattggcaatggggtatggcagtgtgtgtgtggtgctgcactgcacctcccgaagtgctgtaatttttgtctatacttctgctaaattgtccatctgaaaagctggttgcaatgcttgatagggagtggcatcttcatcagaccccagtatactacctgtgccattattgctaccaa

SEQ ID NO: 234 - DNA, 1751 bp, Oryza Sativa
acatgcacttgcagtcagtggtacaacaccacagcaacgcaccaccggccatcaacctcctctcccctgcttctcgctcgctctcctgccctgtttcttggagaagtgagcttaagtgagagcctctgtccctcgcacacgctattggccatggtggttctcgctggcccgcccgccgtcgatcacatcccgctgctgaggtcgccggaccccggcgacgtcttctccggcgtgccggtcgtcgacctcggcagccccggcgcggcgagggccgtggtggacgcctgcgagcggtacgggttcttcaaggtcgtcaaccacggcgtggccacggacacgatggacaaggccgagtcggaggccgtcaggttcttctcccagacgcagcccgacaaggaccgctccggcccggcctacccgttcgggtacggcagcaagcggatcgggttcaatggcgacatggggtggctcgagtacctcctcctcgccctcgacgacgcgtcgctcgccgacgcctgcaccgtcccgtcctgcgcggtcttccgggccgctctgaacgagtacatctcgggggtgcggaaggtggcggtgcgggtgatggaggcgatgtcggaggggctgggcattgcgcaggcggacgcgctgagcgcgctggtgacggcggaagggagcgaccaggtgttccgcgtgaaccactacccgccgtgccgcgcgctgcaggggctcggctgcagcgtcaccggcttcggcgagcacaccgacccgcagctcgtctccgtgctccgctcaaacggcacgtccggcctgcagatcgcgctccgcgacggccagtgggtgtccgtgccctccgaccgcgactccttcttcgtcaacgtcggcgactcgttgcaggttctgaccaatgggaggttcaagagcgtgaagcacagggtggtggccaacagcctaaagtctagggtttccttcatctactttggagggccaccgttagcacagaggattgcaccattgccacagctgctgggggagggagagcagagcctgtacaaggagttcacatgggatgagtacaagaaggctgcctacaaatcaaggcttggagacaacaggctggcccagtttgagaagaagtagctagctagatgcctagcaacagaactggccggtcaagcaacaacgactttactgcatggcagctagctaccttagctatgtctcacgcacacgtacggtacaccatgaccacgagaagatgaagctgcttaagagagaaaaagaaaagaaaataaaaacaggaagaagataataacttcaagatgcacaatgtacagccaggttggatggatagctagatttttctcgtgtggctaatcaccgtgtgtggtgaggtgggctcctttcctgtttcggaatactgatcgatggatgaacagcctccaatagttaatgttaaccaaatatagcacaacaaaggggttcttttcttcctttggttgtttcttttttcctcttgcctttgattttctcgtcatgctttctgagcattaattatgtgtgcgtgtatttcggtatacgtaacgtacttttacctatgtgtgtatagtacgtggcttgtgttaacaagtaaatattatagtctctctctttcgttatgcaactgacttctgcgcggtccaaatgcattgatggagatatatctattggtgtacaatgtcaccttcaagattaatgaattttcatcactcaggata

SEQ ID NO: 235 - DNA, 1609 bp, Brassica napus
aaagcctcccaaaaactgcaaagagtctcatattagttcttactctcagaaataaaacacactctttctgaaaagattagcgtttcaaaccccgaaatggcccgttgtcatggaagtcttgctattttcttatgcgttcttttgatgctcgcttgctgccaagctttgagtagcaacgtagatgatggatatggtcatgaagatggaagcttcgaaaccgatagtttaatcaagctcaacaacgacgacgacgttcttaccttgaaaagctccgatagacccactaccgaatcatcaactgttagtgtttcgaacttcggagcaaaaggtgatggaaaaaccgatgatactcaggctttcaagaaagcatggaagaaggcatgttcaacaaatggagtgactactttcttgattcctaaagggaagacttatctccttaagtctattagattcagaggcccatgcaaatcattacgtagcttccagatcctaggcactttatcagcttctacaaaacgatcggattacagtaatgacaagaaccactggcttattttggaggacgttaataatctatcaatcgatggcggctcggcggggattgttgatggcaacggaaaaatctggtggcaaaactcatgcaaaatcgacaaatctaagccatgcacaaaagcgccaacggctcttactctctacaacctaaacaatttgaatgtgaagaatctgagagtgagaaatgcacagcagattcagatttcgattgagaaatgcaacagtgttgatgttaagaatgttaagatcactgctcctggcgatagtcccaacacggatggtattcatatcgttgctactaaaaacattcgaatctccaattcagacattgggacaggtgatgattgcatatccattgaggatggatcgcaaaatgttcaaatcaatgatttaacttgcggccccggtcatggcatcagcattggaagcttgggggatgacaattccaaagcttatgtatcgggaattaatgtggatggtgctacgctctctgagactgacaatggagtaagaatcaagacttaccagggagggtcaggaactgctaagaacattaaattccaaaacattcgtatggataatgtcaagaatccgatcataatcgaccagaactactgcgacaaggacaaatgcgaacaacaagaatctgcggttcaagtgaacaatgtcgtgtatcggaacatacaaggtacgagcgcaacggatgtggcgataatgtttaattgcagtgtgaaatatccatgccaaggtattgtgcttgagaatgtgaacatcaaaggaggaaaagcttcttgcaaaaatgtcaatgttaaggataaaggcaccgtttctcctaaatgcccttaattactaagttgattatgtaatatacataaatacgtattatatgtggttatagatgccatctatatccttatctacgtattgattctcgatatatatagaaaactaaggatttatgggaatatacatacaatagttgagataattgttgtcttgtatatggttcactgaagttgattgcttgtccacgaataaatgaataatgtcatttgtc

SEQ ID NO: 236 - DNA, 1302 bp, Brassica napus
atggctcattgttggacagttcttaccggtttactagtatggtctcttttgatgctctcatggtgcgaagcttcaagaaacaacattaatagatatgatcattcttatggaacgttcaaatccaatagcttaatcaagcgaagagacgatatcactcgtctgaaaagtgttgcaagagcttctttgcggcttccaaccaccgttagtgtttctgattttggagctaaaggagatggaaaaaccgacgacacgcaggcgttcgtgaatgcatggaagaaagcttgttcttcaagtggacctgtaaatctcttagttcctgaaggaaaaacttattttctcaagtctcttcgattaaatggcccatgcaaatcagttcttaccgttcagattttaggaacgttatcggcatctcaacaacgatcggattataaagatctcagcaaatggattacgtttgacggcgttaacagtctaacggttgatggcggggccaccggaactgtcaacggaaacggcgaaacgtggtgggaaaactcatgcaaacggaacgaagctaagaaatgcacaaaagccccaacggctcttactttctacaactcgaagaatttgagagttaataatctgagggtgaaagatgcgcaacagatccagatttcgattgagaaatgctccaacgttcaggtctcaaatgttgaggtcactgcgcctgctgatagtcctaacactgatggtatccacatcactaacactcaaaacattcaagtctccaaatccatcattggaacaggtgatgattgtatatctattgaaagtggatcacaaaacgttaaaatcaacgatttaacttgcggccccggtcacggtatcagcattgggagcttaggagatgacaattcaaaggcatttgtatcaggcgtgactgtggatggtgctaaactttccggtacagacaatggagttaggatcaaaacttaccagggagggtctggaactgctagcaacataatatttcagaacattcagatggagaatgtgaagaatccaatcataatcgaccaagattattgcgacaagagcaaatgcaccgaacaaaaatcagcggtccaaatcaagaacgtggtgtaccggaacataagcggcacaagcgcatcagacatagcaataactttcaactgtagcaagaactatccatgccaaggaattgtactcgacaaagtgaacattaagggagggaaagcgagttgcagcaacgctaatgtgatggataaagacggtgttttgcctcagtgcaaatccacttga

SEQ ID NO: 237 - DNA, 1358 bp, Brassica napus
attctccaactttcatattggtagttacaaataagtttttgtaaaaacagtacatgctctgttctcttgatcttgattcttgatttagataatcttaaaatctgtgttgatcatgatgtcggaatctatgagtatatcagtgaacggacaatctcaagtgcctcctgggtttaggtttcacccgaccgaggaagagctgttgcagtattatctccggaagaaagtaaatagcatcaagatcgacctcgacgttattcgcgacgttgatctcaacaagctcgagccttgggatattcaagagatgtgtaaaataggaacaacgcctcaaaacgactggtatttctttagccacaaggacaaaaaatatccgacggggacgagaactaaccgagctacgacggtcggattttggaaagcaacggggcgcgacaagatcatatatagtaatggccgtaggattgggatgagaaagactcttgttttctacaaaggccgagctcctcatggccaaaaatctgactggatcatgcatgaatacagactcgaagacaacgttatttcccctgaagatgtcaccgttcatgaggtggtgactatcattggggaggcatcacaagacgaaggatgggtggtgtgtcgtattttcaagaagaagaatcttcacaaaaccctaaacagtcccatcggaggagcttccctgagtggcagcggagacatggcgacgacgtcgtcctcatctcagttcttcaacgatgatagtttcgagcaattcctagaacttatggggcgatcttgtaaagaagagctaaatctagaccctctcatgaaactcccaaacctcgagagccctaaaagtcaaacattcaacaacaactgccacgtcagctccccggacacaaatcatgttatccagatcagcaacgtgatcgacactcgcttcgtttctagctggtccgctttagaccggcttgtggcctcgcagctaaacgggccctcgatctcagccgtcgatgagagccacgcggatcaagatcacctcgctttaccttccctccgatctccatacccaagcctaaaccggtccagttcgtaccacgatgggttatcgcaggaacatccagcggagttggagctatggaacacgacaacgtcatctctatcatcatcgtctggcccatttttccacgtgtctaacggtagtggataagtgaaagggagggaaagcgagacacacacagagaagacatttcacatttgtgtagaaagatataatcataccatatagttgttgagacattaaaaaaagaagtcaaatttgtgataattacagtggttatgtgaaatattgtaaaatagat

SEQ ID NO: 238 - DNA, 1116 bp, Brassica napus
atgatatcgttaccatcatcaatggcggagagtaaggtaaacctgtcgatcaatggacaatcaaaagtgccaccaggtttcagattccatccaacagaagaagagcttctccattactatcttcgcaagaaagttcactctcaaaagatagatcttgatgtcattcgtgaagttgatctcaacaagctggagccttgggatattcaagaagaatgtagaatcggttcgacgccgcagaacgactggtacttcttcagtcacaaggacaaaaaatatccaacggggaccaggacaaaccgggcaacagtttccggattctggaaggcgactggacgtgacaagatcatctacagttgtgtcaggaggattggattgagaaagacgctcgtgttctacaaaggaagagctccccatggtcagaaatctgattggatcatgcatgagtatcgcctcgacgagactccaacaactaatgaatattcagatgttgtaagtgaagatccaatgagctacaacgaagaaggttgggtggtatgtcgagtgttcaggaagaagaactatcaaaagatcgacgactctcctaaaatcactctatcttcttcacctggtgacacggaggaaaagaaaaggtccaccacctcccacaacactcaaaacggcaacgtcttggaccacgttcttctatacatggaccgttcctgtcccaacatctgcatgcccgagctccaaaccacgatccaacgtcaacataatcaagacgatattttattcatgcaactcccaagtcttgagacacccaaatccgaggacctggtcgaccaaagtttaaatattccaaaccagctcgattcctctctggttcaagagaagaaaaacggcagaccggtttgcagtaattgggctagtcttgaccgactagtggcgtggcagttgaacaacggtcatcataagtgtgatcgtgcgagttttgatgaagaagaggaagatggtgataccatgatgcagcgatgggatcttcactggagtaatgatgatcatgtcgatctttggagtagtttcactgaatcttcttcatccccttcgtctttagatcctcttctccatttatctgtatga

SEQ ID NO: 239 - DNA, 1222 bp, Glycine max
caccgtgctacttgatggtggtggtacattcaaggactttatcaaacaaaaaagtacagatgttatgagcataaggaaatttggcaaattgggtgacatttcttcttcgcttaaaacggttaacgtcaatgattatggagctcgcggagatggcaaaactgatgacactcaggcattcaaggaagcttgggaagtagcatgttcttctgggggagcagtttttgtggtgcctcggaaaaattatctactcaagccattcacattttctggcccttgcgaatccgacatagaagttcagatttctggaatcattgaagcatcagaaaacctatcagattacagcgaagacctaacccactggcttgttttcgacagtattgagaaactatcagttaaaggtggtggaaccatcgatggaaatggaaacatatggtggcaaaactcatgcaaagttaacgaaaagcttccttgcaagaatgcccctacggcattgactttctacaagtgcaaagatttgacagtggaggatttgacgataaaaaatggccaacagatgcaagtttcattccaaaactctgagaatgttcaagtttctgatctcacagtgacagcaccgggggatagccctaacaccgatggaatccatgtcacaaacacccaaaacattcaaatctctaactccgttataggaactggtgatgattgtatatcaattgtaagtggatccaaggatgtactagccacagacataatctgcggaccaggccatggtatcagcatcggaagcttgggggctgagggatccaaggacttcgtttcaggaataacggtgaaaggagctcagctttctggaactacaaacggactaagaattaagacatggcagggaggatcaggaagtgcaagcaacatccaatttcagaacattcaaatggacaatgtggccaaccccataataattgaccaaaactactgtgatcaagagacaccatgcgaagaacaaacatctgcagttcagattaggaatgtgttgtaccaaaacataagtggcactagtgcttctgatgtgggtgtgcaatttgattgcagtaagaaatttccatgccaggggatagtgttgcagaacatagacctgaaacttgaaggtggaggagaggccaaggcttcatgcaacagtgttgaattgtcctacagaggagatgttaaccctctctgcccatag

SEQ ID NO: 240 - DNA, 1323 bp, Glycine max
atgtctccacaaacgccaactatcccacttttcattgtcctcgcttcattagtcttatgtaatggctattacttagaggaatcattttataaaacaaatgctaaacactaccctgtgcatgatgggagattgatcaagacaaaacacgagcattttggtctaataacaagggctaatagagctagccatcttacttctaggcctcgtggaacagttagtgttgatgactttggagccaaagcagatggaagtgatgacagcgaggcatttgggaaggcatggaatgaagcatgttctagaggggctatccttgtggtacctgaaaataggatctatcgtcttaagccaataatattttctggtccatgtcgacccaacactgcctttatgctctatggaacaatcgaggcatggtctcaaatgtcggcataccaagaagatagacaacattggattgtgtttgatagtgtttcaaatttcagagttggtggtggtggcacattcaatggcaaagggaaaaagtggtggcaaagctcctgcaaagtcaacactaaccttccatgcaacgacggaccaagaccaaaagccgtgactttctatcaatgcaacaatttgaaagtgacaaacctgaggtttaaagatgcaccgcaaatgcatgtggtctttgaaggatgcttcaatgttattgtttcgaatctcgtcatcagagcaccaggtgacagccccaacactgatggaattcatgtcgcagacacacaaaatattgtcataagtaacagtgacattgggacaggtgatgattgtatttcaataataagcgggtcccaaaacgtaagagccacagatattacctgcggacctggacatggaataagcattggaagcttgggagcagataactcggaagctgaagtctctaatgtggtagtgaacagagcaaccttaacaggaacgactaatggagtgagaataaagacttggcagggaggttctggttatgcaaggaacattaaatttttgaacatagcgatgcaaaatgtgacaaatcccataatcatagatcaatactactgtgatcaatcgaagccatgccaagagcaggactcagctgtgcaattaagcaatgtgttgtaccaaaacataaaaggaacaagtgcctcagaagtggctatcaaatttgactgcagccgagccgtcccttgcagacaaatttacgttcaggatgtgattttagaaccccaaggccatggtggcaccattgctacatgtgaacatgttagttatgtcaacagaggaaagttttttcctcaatgcactccatga

SEQ ID NO: 241 - DNA, 1287 bp, Glycine max
atggccctccaaaggcatcacctctcgttactttttatcatgttttcttttgttgcttgtcatagcaccgtgctatttgatgatggtagtacgttcaaggactttatcaaacaaaagagtacagatgttttgagcttaaagaaatttgtcaagttgggtgacatttcttcttcgcttaaaacggttaacgtcaatgattatggagctcgtggagatggcaaaactgatgacactcaggcattcaatgacgcttgggaagtagcatgttcttctgggggtgcagttcttctggtgcctgagaataattatctactcaagccattcagattttctggcccttgcagatccaacatcgaagtccagatttctggaaccattgaagcatcagaaaacctatcagattacagcgaagatctcactcactggcttactttcgacagtgttgagaaactatcagttaaaggtggtggtaccatccatggaaatgggaacatatggtggcaaaactcatgcaaagtgaacgaaaagcttccttgcaaggatgcccctacggcattgactttctacaagtgcaacgatttgacagtggaggatttgacgataaaaaatggccaaaagatgcaagtttcattccaagactctgagaatgttaaagtttccggtctcactgtgacagcaccgggggatagcccaaacactgatggaattcatgtcacaaacacccaaaacattcaaatctcaagctccgttataggaactggtgatgattgtatatcgattgtaagtggatccaaggatgtactagccacagacataatctgcggaccaggccatggtatcagcatcggaagcctaggggctgggggatccaaggacttcgtttcaggaataacggtgaaaggagctatgctttccggaactacaaatggactaagaattaagacatggcagggagggtcaggaagtgcaagcaatatccaatttcagaacattcaaatggacaatgtgaccaaccccatcataatagatcaaaattattgtgatcaagagacaccatgcgaagaacaaaaatccgctgttcagattaggaacgtgatgtaccaaaacataaagggcacaagtgcttctgatgtgggtgtgcaatttgattgcagcaacaactttccatgccaggggatagtgttgcagaacatagacttgcaacttgaaggtggaggaggggccaaggcttcatgcaacagtgttgaattgtcctacagaggagatgttatccctctctgcccatag

SEQ ID NO: 242 - DNA, 1319 bp, Glycine max
ctcttccttgtagtgtacccattttgaatgtgttctctctctctctctctttctttaggtccctggtgaatatctagaaccactctctagctagtttctctcttcttgctagctagctatcgccgatcactctcttggtttaaaccacctgaatgccggaaaacatgagcatatcagtgaatggtcaatctcaagtccctcctggcttcaggtttcatccaactgaagaagagcttcttcagtactacttgaggaagaaggtctcttacgagaagattgacctcgacgtgattcgtgacgttgatctcaacaagctcgagccatgggacatacaagagaaatgcaaaataggaaccactccgcagaatgattggtacttcttcagccacaaagacaagaagtaccccacaggaacgcgcaccaatcgcgcaactgctgcagggttctggaaggccactggccgcgacaaagtcatctacagcaatggaaagaggattggaatgagaaagactctggttttctacaaaggaagagcgccacatggccagaaatccgattggatcatgcatgaatacagactagacgacaacaacaccagcgacatcaatattgtgtccaatgtgatgggggatgctgctcaggaagaagggtgggtggtgtgcaggatattcaagaagaagaaccatctgaaaaccctagacagccccttagcttccggggaaggtagaaggagccacatgttcgactcgtgcgacgagggagctttggagcaaatacttcagcaaatgggaaggggttgcaaggaggagagcagctatgaaggcaactacaacagctatggaaggtttgcaatggggttgaacaatggcggcggcggtggatacaatgataggttcatgaagctcccgagcctcgagagcccaaaatccgcaagcatggagaaccaccacaacaccaacaacaactgcaacaataacatgaagagtggtggaggcctcaccaactgggctgcgctggaccgtttagttgcatctcaactcaatggccaaaccgatgcctctaggcaactaggatgtgctttcaacgaccccaccatgtattgcaccagcgtcgaccatcatgatcttcatcatcaaatccccaccctccgatcctcatcaacgtccgctaacacacgaccttcccctgcacccgcattcatcaaccccccaacacaggacttcaccagcgagattgacctttggaacttctcccgatccacgtcctcactgttggcatcctccgaaccactgtgccacgtgtccaacacgtcagtgtag

SEQ ID NO: 243 - DNA, 1461 bp, Glycine max
acacatcaccacctcatcatctatctttctttctttctttcatatcctcttccttgtagtgtacccattttgaatgtgttctctctctctctctttttctttgggtccctggtgaatatctagaaccactctctatctagtttctctcttcttgctagctagctatctatcatcgatcactctcttggtttaaccacctgaatgccggaaaacatgagcatatcagtgaatggacaatctcaagtccctcctggcttcaggtttcatccaactgaagaggagcttcttcagtactacttgaggaagaaggtctcctatgagaagattgaccttgacgtgattcgtgacgttgatctcaacaagctcgagccatgggacatacaagagaaatgcaaaataggaaccactccgcagaatgattggtacttcttcagccacaaagacaagaagtaccccacaggaacgcgcaccaatcgcgccactgctgcagggttctggaaggccactggccgtgacaaagtcatatacagcaacggcaagaggattggaatgagaaagactctggttttctacaaaggaagagccccacatggccagaaatccgattggatcatgcatgaatacagactagacgacaacaacaccgctgacaccaatattgtgtccaatgtgatgggggatgctgctcaggaagaagggtgggtggtgtgtaggatattcaagaagaagaaccatctgaaaaccctagacagccccttggcttcaggggaagatagaaggagccacttgttcgactcgtgcgacgagggagctttggagcaaatacttgagcaaatgggaaggagttgcaaggaagagagcagctatgaaggcaactacagaaactatggaaggtttacaaggccttatgagacaacagggttgaacaatggcggcggatacaatgataggttcatgaagctcccgagcctcgagagcccgaaatccgcgagcatggagagccaccacaacaccaacaacaacaataacatgaatagtaataataataataatggtgataacaacgagaacaacaataataatgggtaccatcccatgattccagtagagatgggcacagacaacgaagggtcattcacaacgcaccaggtgagtggtggtgaccccaacaacaacaacaacaacatggttcatccattggaggtaggatcaggtggtggaggcctcaccaactgggctgcgctggaccgtctagttgcatctcaactcaatggccaaaccgatgcctctaggcaactcgcgtgtgcattcaacgaccccaccatgtattgcaccacattcatcaaccccaccacacaggacttcaccagcgagattgacctttggaacttcacccgatccacgtcctcactgttggcatcctccgaaccactgtgccacgtgtccaacacgtcagtgtag

SEQ ID NO: 244 - DNA, 771 bp, Glycine max
atggaatttcccaacgaagcaataccagaagggtgttcacagaagaaaacgggaagggggaaaatagaaatcaagcggatcgagaacacaacgaataggcaagttaccttctgcaaacgccgtaacgggttgctcaagaaggcttatgaattgtctgttctgtgtgatgctgaggttgctcttgttgtcttctcaagccgtggacgcctctatgagtatgccaacaacagtgttagaggaacgatcgataggtacaagaaagcatgtgctgcctccacaaatccagaatctgtctctgaagctaatacacagttttatcagcaggaagcgtccaaattaaaacgacaaatcagagacattcagaatctaaacaggcacatccttggtgaagctcttagctctctgagtctgaaggaattaaagaacctggagagtagactggagaaaggtttaagcagagttagatccagaaagcatgaaactttgtttgccgatatcgagttcatgcaaaagcgggaaatagagctgcaaaaccataataattttctgagagctaagatagctgaacacgagaaagcacaacaacggcaacaggatatgataccgggaaatgtgtgcgagtcaaccatacctccacaatcatatgaccgcaatttcttccctgttaatctcatagattccaataatcaatattcaaatcaagaccagactgctcttcaacttgtcctttcaagtggtgtgggatcccttacatcgtcctatgtttcgtga

SEQ ID NO: 245 - DNA, 453 bp, Glycine max
atgtcaccaacactcgtagaacttgacatcaacacgaagccggaaataaacttgaccttcaaaagcatctgtcataatggtggcaattcctctgtgcatgaagaaatctccggtgccaccgatcaccgagacatccctagtcttcttcaaggtagggtcggctccagccaaggtgatggttccacgatgatcagtgctgttgagaacaaacgtgaatccaagccacgcagtgaaggtgttcttggtgtcgtaaatgtaagagccttgtgccctaccgacttggttggagtgaaggttgttgtccagcgtgacggggtcgtcgaaaaccactatgtttccgaagtggaactggctcgccaatttgtttgcaccttctggggctgccactattgcggacgttgcattggctgcgttgcttccgttgtagatgatgtcgtggaagaagaggactaa

SEQ ID NO: 246 - DNA, 1182 bp, Oryza Sativa
atggcctccactgtgctcattgtctctgcatctctccttgcactcttcttcttcttgcatagtgctgatgcagatgttggcagtaatgtgttcagcatacagagctacggggctcatggagacggacgacatgatgacaccaaagcattgggagatacatgggctgcagcttgctcctctgcaaaacctgcagttttgctcatccccaagggcaagaaatacctgatcaagcacacaacactgtctggtccatgcaaatcaagcatctcattgatggtgaagggtagtttggtggcttctccagagaggtcagactggagcaaggagaccataaggcactggattctgatcagtggtgtcactggtcttactgtcactggtggtgggaccatagatggaaatggcaagatttggtggcaaaattcatgcaaaaccaactcaaagcttccatgcacagaagctccaacggcactgacattctactcctgcaagaatctgaaggtagagtatctgaaggtggtgaacagccagcaaatccagatttcagtggaggattgcaccgatgtgatggtgtctcgcctgtcgatcacagcaccagaaacagccccaaacactgatggaatccatatcacacgcagcagagatgttgaggtgacagactgcatgatcaagaccggggatgactgcatgtcaatcgaggacggaaccgagaacctgcatgtcaagaacatggtgtgtggaccgggacacggcatcagcatcggtagcttgggtgatcataattctgaagctcatgtcaacaatgtcaccgtcgacaatgtcaggttgtatggcacagccaacggagctcgcatcaagacatggcagggaggaaagggttcagcgaagaacatcgtgttccagaacatggtcatggacaatgtctggaaccccatcatcatcgaccaaaactactgcgactcttctacaccctgcaagcaacagaaatctgcagtggaggtgagcaatgtgctgttcaagaacatcaggggcacaagtgcatcagaggaggccatcatgctgcattgcagcagcagtgtaccttgccatggcataaccttggagaatgtcaatctcactgtcaagggaggaattgatctgaaacatgaacatccttggaccttggaagatgtagagaagtag

SEQ ID NO: 247 - DNA, 1344 bp, Oryza Sativa
atggcttgcaatgtgctccttttctctgcatttgtcgttgtcatgtccttcttcttgtgtagtgttcatgccaaggtcaacatgaatgcatcctctttgactaatggagatgatagtctgagaggaaagtcgtctctcgagtcgaagaaggctgtgttcgatgtgcgcaaacatggctcttacggagatggacaacatgatgatacaaaggcattgtcaaaggcatgggctgcggcttgctcctctttgcaaccttctattgttcttgttccaaagggcaagagatacctcaccaagcacattacactatctggcccatgcaaatccagcatcacgttcatgatagagggtactttggtggctcctccaaagaggtcagattggagcaaggaaactattaggcactggattatgttcaatggtgtaattggtcttactgtcgctggcggtgggacggtcgatggaaatggcaagatttggtggcaaaattcttgcaaaacgaatgcgaaacttgcatgcactgaatctccaacggccttgacattctactcctgttcaaatctgaaagtggagaacttgaagctactaaacagccaacaaatccacatgtcagtggaggattgcacaaatgttaggatctctggcctgacaatcacagcaccaggcactagcccaaacaccgatggcatccatatcaccagaagtaaaaatgtacaagtgacaggctgcacaatcaagaccggggacgattgcatgtcgatcgaggatggaactgagaacctccatgtcaagaacatggtgtgcggaccaggacacggcatcagcatcgggagcctaggcgatcacaactctgaagctcatgtcaacaatgtcaccatcggcactgtcaggctatatggcacaaccaacggagctcgcatcaagacatggcagggtggtcgggggtacgcgaagtacattgttttccagaacatgatcatggaaaatgtttggaaccccgtcattatcgatcaaaactactgtgactctgcaacaccatgcaagaaacagttgtccatttgtgtgaataatatggaagcttataatttagtgtttttgtctcagacatctgcagttcagattagcaatgtggtcttcaagaacatcaggggcacaagtgcttccaaggaggctatcaagctggactgcagcagaaatgtaccttgccaaggcataaccttgaatgatgtcaagctcactgtcaagggaggtggtggtgatgcgaagagcacttgccgaaacgcaaaatggaagaaatcagggacagttgttccacagccttgtgcttccacaacaactgtatga

SEQ ID NO: 248 - DNA, 1451 bp, Oryza Sativa
atcatcagtaaatcactgggttaatctctcctctcttaagttctagctactgctacaatatgggtcccaggaagcttcatctggcctccatttctgccctatcaatctttctctacgtgtttgctcacaccaattcagcacaagccttccccgtcgctgacggcacgtaccctcctgaagctgaaggcccagcagcagaaagttcagacatggacgagcagctggagctcacccctggaccgcagccgagggtcgtcgacgtcgacgactacagagcgagagccgacgccggcgaccacacggaggcgtttcttcaggcctggaaggaggcctgcaactcctccgattacccatccgtgctcctcgtgccggaggggaagacatacctcctgatgcctgtaagcttcaatggcccctgcagagccaccacgatcactgcaacgataagggggacgctggaggctccatcgaatcgatcggtttggctcgatcgcgatctgcaggaatggatcacgttcgacaacatcgatcacctccgtgtcctcggcggcgggacgctcaatggcaatggacaccaatggtggatcaactcttgcaagaccaacagatccatgagatgcgtcaccggcccaacggcgctgtacttcaggaggtgcaaccatctggtcgtggagggcctccagatcagggacagcatgcagatgcacgtcgtgatcgcctactcctggagagtgctggtctcgaggctgctcatcacggcgccaggatggagccccaacaccgacggcatccacgtatccaacagcagggaagtgttgatgagtggctgcatcatcagcacaggtgatgactgcatatcaattgtgaccggctctatgtttatacgggcaactgggatattttgtggaccaggccatggcataagcattggtagtctaggagcaaacaaatcatgggcccatgtttccgacgtgctggtggagaaagctacactggtgggcactaccaacggtgtgcggatcaaaacttggcagggaggagatggccatgcagaaaggattacctttcaagatataacaatgcacaacgtcactaacccggtgattatcgatcagaattactgtgactccatgacaccatgtcatgaacagggatcagctgtcgccataaataacatacgctacaggaacatacgtggaactagttcttcaaaagtcgccatcaacttcgtctgcagcaactctgtccattgtgatggcatagtgatgcaggatgtttctttggttggagaaggatcctacgtttcttgttcgtacatgaatgctagagtggtagagttggggtataacttcccgtattgcagagcggaaatgtagtgtatctgtagtactgcagagcggaaatattattcattctttcgataaataatactccctccattctaaaatata

SEQ ID NO: 249 - DNA, 1269 bp, Oryza Sativa
atggcttgcaatgtgctcattttctctgcatatgtcgtcgtcatgtcgttcttcttgtgtagtgttcatgccaaggtcaacatgaatgcatcattccatttaactagtggagatgatagtctcagaggcaggtctcttgagtcaaagaaggtggtgttcgatgtgcgcaaacatggcgcttacggagatggacaacatgatgacacgaaggcattggcaaaggcatgggctgcagcttgctcctcttcgcaaccttccattgttctcatcccaaagggcaagagatacctcaccaagcacattacactatctggtccatgcaaatcaagcatcacgttcatgatagagggtacgttggtggctcctccaaagaggtcagattggagcaaggaaactattaggcactggattatgttcaatggtgtgagtggccttactgtcgctggtggtgggactgtcgatgaaaacggcaagatttggtggcaaaattcctgcaaaacgaatgcaaaacttccatgcactgaagctccaacggccttgacattctactcctgttcaaatctgaaagtggagaacttgaagctactaaacagccaacaaatccacatgtcagttgaggattgcactgatgttaggatctctagcctgacaatcacagcaccaggcactagcccaaacaccgacggcatccatatcacaagaagtaaaaatgtacaagtgacaggctgcataatcaagaccggggatgactgcatgtcgattgaggatggaactgagaacttacatgtcaagaacatggtgtgtggaccgggacacggcatcagcatcgggagcttaggcgatcacaactctgaagctcatgtcaacaatgtcaccgtcgacaccgtcaggctatatggcacaaccaacggagctcgcatcaagacatggcagggcggttggggctacgcgaagaacatcgtgttccagaacatgatcatggaaaatgtttggaacccaatcattatcgaccagaactactgtgattctgctacaccctgcaaggaacagacatctgcggtgcaagttagcaatgtggtcttcaagaacatcaggggcacaagtgcttccaaggaggctatcaaactggactgtagcagaaatgtaccttgtcaaggaataaccttgaaggacgtcaagctcactatcaagggaggtggtagtgatgccaagagcacttgcggaaacgcaaaatggaagaaatcagggatagccctgtgctttcagtaa

SEQ ID NO: 250 - DNA, 2172 bp, Oryza Sativa
ttgtaccccatccgagatcaatatccatccatccatcaccacctagcagctctacacctctctcttatattagctctctctctctctctacccccattcatgctcatctccttctagcttccagcttaatcccttccttgtcaatgttaatggacaaactctgagcattgcactacccatcatctcctagctagactcaccttagcttgtctctctgctgctccagtgtgtgattctttctcccatttcctgtttggtttgcactgagtgaacaagcaattaagcttggtagtagtagtagttgttgtattgatcgatcgatcgatctagagacgacgatgagcatatcggtgaacgggcagtcggtggtgccaccggggttccggttccacccaacggaggaggagctcctgacatactacctgaagaagaaggtggcctcggagcgcatcgacctcgacgtcatccgcgacgtcgacctcaacaagctcgagccatgggacatccaagagaggtgcaggattgggtcagggccgcaaaacgactggtacttcttcagccacaaggacaagaagtacccgacggggacgaggacgaaccgggcaacggcggccggcttctggaaggccaccggccgcgacaaggccatctactccagctccaaccgcatcggcatgcgcaaaaccctcgtcttctacaagggccgtgccccccacggccagaaatcagactggatcatgcacgagtaccgcctcgacgacccctcctccgcctccgcctccgtctccgtcaacctcccctcctactactcttcctcctcatcgtcatcttccccaatgcacggtgtcgccggagaccaaggagctcaggaggaaggctgggtgatctgcagggtgttcaagaagaagaacctcgtgcaccacggcggcggcgccgccgcggcgagccaccacgcggcggccaagctcgcggcggcggccatggagggcagcccgagcaactgctcgacggtgaccgttagcgaccacgtcaaggcgcagatgctgcactcgtccgccagcgacgacgccctcgaccacatcctccagtacatgggccgctccggctgcaagcaggagaccaagccggcggcgatgtcggcgtcgtcggcggcagcggcggcggcgctggagcagcacctcagtacgcctcagtacggcaagttcatgaagcttccgccgctcgagcacgtcgccggcggcgtgggcctcctggcggcggccggcggcggcggcgagtactgctccgccgccgacgcgtcggggatcgccgactgggacacgctggaccggctcgcggcgtcgtacgagctcaacggcgccctctccgacgtcgcctccggcaagaacatggccggcttcttcgacgtcgtcgatcagcccgccggcgccgccgccttctcctccggcgacggcgacctgtggagccttgcgcggtcggtgtcatcgtcgctacacgcagacttgacgaccatgaataacgtataataattggagacaagaggtgacgatggagatgatgcatctagacgtggatggcgtatgcgtgcactaactctactcttaatctggtcggtctacgcatattgcatgcatgcatggacgacggtattgtacgtacgtgatcaataattaattactagttagggttccagcgagagtacaagacgacgacgacgacacaatagctagctgagctggccatgtgagcaagctctagacactaggtcaagatctaaccgtcgatcgatctgagccgttgatcgatcgatcgacgatgatggtgttgatcgatcgaattatagtgcagtggtcgagcgagttgttgtgtcgatctgaaacaagagagaggaaaaaaagaattaaaaggacgtacggcgtggtaggagagagagagagagagcatatataaatattatgtatctatatattgttatatattgtacctatagcttattatatatcaaagacatttttctagtgcagcgaggtgtgatttcttttctgatgatcatatcatatatatcatcatcgatcactgatcaccgtgtgagtgtactaattattgtgtgatcgatcgctcgatggatggattaataaactagttgtgtgcctgtgcgcgtgttttttcaga

SEQ ID NO: 251 - DNA, 1985 bp, Oryza Sativa
gtccatccttctcccaatcaagcatccatccatcctccccaactatatataaaccccacacctttccctcgccaccgccctcgatcgtcttcttcctcctcctctcaatctcttcttccttctcctgcagccgccatttctagctagctatacgatcgatctatacatatatatcagaaggaaggaagaggctaattaagctagctgttgctagagctagcaagagcgaggagattgagcagctaggtaggtagcaagaaggagaagaagaagaagatcatcaatgagcatctcggtgaacgggcagtcgtgcgtgccgccggggttccggttccacccgacggaggaggagctgctcaactactacctccgcaagaaggtcgcctccgagcagatcgacctcgacgtcatccgcgacgtcgacctcaacaagctcgagccatgggacatccaagagaggtgtaagattgggtcagggccgcagaacgactggtacttcttcagccacaaggacaagaagtacccgacggggacgaggacgaacagggcgacggcggccgggttctggaaggccaccggccgcgacaaggccatctacaacgccgtccaccgcattggcatgcgcaagacgctcgtcttctacaagggccgcgccccccacggccagaagtccgactggatcatgcacgagtaccgcctcgacgaccccgccaccgacaccgccgccgccacacccacggttacttctgctgctgctgcggcggcggcgatggcggcggcggcggacggcgggcaggaggatggctgggtggtgtgcagggtgttcaagaagaagcaccaccacaaggaggccggcggcggcggcggcaagcacggcggcgacggcagcgccggcgccaaggcggcgcacgcttactcctccagcgacgacgcgctcgaccagatcctgcagtacatgggcaggtcgtgcaagcaggagcacgagctcccctcgccgcaggccagcggcggcggcggcgccggcgcagggagcaggccggcgtcgaggtacctccggccaatcgacaccgtgctcggcggccatggcttcatgaagctgccgccgctcgagagcccgtcggccgccacggcgctctcctccactccgagcaccggcggcgacgcggcctcctcggccgccgccgccgccgccgaccacctgctgctccaccaccaccaccgcacggactgggccatgatggaccgcctcgtcgcgtcgcacctcaacggcgccaactccgacgcgcccgacgaccagctctgcttcgacgccgccgacgacgacggcctcgcctactactccgccgccgccacgaggctgctcggcggtgccaacgccggcaccgacgacgacctgtggagcttcgcgcggtcggctgcgccgccaccgccgccgccgccgccgtcgtcggccacgccagagcgtctcagccacgtggcactgtaacacatgattcgtagctgtacgtacacgtacacgtatacgtacacgtcaggctacgtacgctcgagctgccaccctagctgctagtacagtaattacagagacaagacaagtaagaagaaaattgtaagtgaaaaaaaaaataaaagcaagagagagagagagagagagatccaccatgaatgatactgatagagagacatcattcgatcgatatatttcaaaggtgattagcaaagatcgagtgattaattaattagtgagtgagacactgagaaaagaaagaaagaaaagaaagaaaaattaaggagccaaaagagaggaggagaaaaaagaagaagaagagagattaaaggcaaagcgagtagtaagttagggtggcactgtcaaacatgtctgcatccaatgtttaattaattaattaaccctactacctgtccaggacagaaaaatatatattagcatctcattacttataatatactccctccgttttaaaata

SEQ ID NO: 252 - DNA, 1472 bp, Brassica napus
atgtctgctgctgtgatagagggaaacgatgctgttacaggccacatcatttctactacaattggaggcaaaaacggtgaacctaaacagaccatcagttacatggccgaacgggttgttggacaaggatcattcggaatcgtgttccaggccaagtgcttggaaactggagaatcagtcgccattaagaaggttttgcaagaccggcgctacaagaatcgtgagctgcagttgatgcgactaatggaccacccaaatgtggtttccttgaagcattgtttcttctctacaacgagtagagatgagctcttcctcaatctcgttatggagtatgtacccgagactttgtaccgggttttgaagcactatactaattcaagccagagaatgcctattttctatgtcaaactctacacataccaaatcttcagaggcttggcttatatccatactgttcctggtgtctgtcacagagatgtgaaaccacaaaatcttttggttgatcctctcactcatcagtgtaagctgtgtgattttggaagtgcaaaagtattggtgaaaggtgaagcaaacatatcatacatttgctctcggtattaccgagctccagagctcatctttggggccacagagtatacatcctccatagacatatggtctgctggttgtgttttggcagagctccttcttggccagccgttgttcccgggagaaaattctgtggaccagctggtagagatcatcaaggttcttggtactccaactcgagaagaaatccgatgcatgaatccaaactacacagacttcagattccctcaaatcaaagctcacccgtggcataaggttttccataagaggatgcctccagaagccattgacctcgcatctcggcttcttcaatactcaccgagcctgcgttacactgcgcttgaagcatgtgcacatccatttttcaatgaactccgtgagccgaatgctcgtcttcctaacggccgacctctaccagccttgttcaacttcaaacaagagttagctggggcttcaccagagctgataaacaggctcataccggagcacataaggcgacagatgagtggaggcttcccatcacagcctggtcattagaaaaggaatatggaaactgggatgcttttgcggagcaaatgccttatggaaaagaggagagaagatctctgatttttcagagggtttaactaaaatatcagcttatgagtagagagatgattggccaattaagctttttgagaaatcaggaggtggtgatgattgtgtctaatatacaattctctcttttctctttttatgttataattcgcttttgacttgtagagataccttttctcgttgtattatttgtatatgtttttgtccgtaagacagcaaaccgcgatgatggaagaatggaatgaatgaatgatgtctaaaacttaagcctaataacaaggtcggag

SEQ ID NO: 253 - DNA, 816 bp, Brassica napus
atgggtgtaatagaggaagctcacaacgtgaaggtgattggctcaggaaataaagggacggtcgtattaggtcacgggttcggtacggaccagtcagtatggaaacacctggttccacatctggtcgacgattaccgcatcgtgctctacgacaacatgggagccggtacgaccaatccggaatatttcgactttgatcgttactcaactctcgaaggtttcgcctttgatttgcttgcaatcttagaagaccttcaaatcgagtcttgtatctttgtcggtcactctctttccgccatggttggtgtcttggcttctcttaaccgacctgacctcttctccaaaatcgtcatggtttctgcttccccaagattcgtgaacgatgttgattaccaaggtggattcgagcaagaagacctaaaccagctttttgaagcgatacgaagcaactacaaagcgtggtgcttaggtttcgctccactggtggtaggtggagacttggactcggtagccgttcaagaattcagcaggactctcttcaacatgcgtccagacatagctctctccatggctcagaccattttcagtagcgacatgagacaaatcttaccatttgtctctgtcccttgtcacatcgtccaaagcgctaaagatttagccgtaccggtcgccgtatccgagtatcttcacaccaatctcgggtctgaatccgtcgtcgaggttatgtcttcagagggtcatcttcctcagcttagctcgccggcctctgttattcccgttctcctccgtcacatccgccaggacattactgtctga

SEQ ID NO: 254 - DNA, 1707 bp, Brassica napus
atggaagatcctaccgcaagcaacgtgactcctccggcgaattcatcttctcagataataatcccatcgccgtcgtcggtgaaagtgtcactcgagtcacgaatcaaccgtctgatcaatgccaaccaatcaccatcaccgtcacggtctatatactccgacaggttcataccaagcagatccggatccaatttcgcgctcttcgatctcgcttctccttctccgagcaaagaagacggcgcaggctcgtacgcgactctcttgcgcgcggcgatgttcggtcccgagacgccggagaaacgggacatcactggcttctcaacgtcgaggaatatcttccggtttaagaccgagacgaatcggtgtttgaattctttttctcctttcgtgtctgatgatggtcctggtgttagtcatgctccgatcaaggccttgaggaaggtgtctcgatcgccctataaggtactagatgcaccggctttgcaagatgatttttatttgaatctagtggactggtctgcgcaaaatgttcttgcggtgggactagggaactgcgtgtacttgtggaacgcttgtagcagcaaggtaactaaattatgtgatctgggagctgatgatagtgtttgctctgttggttgggcatttcgtggaactcatcttgctgtcggaactagttccgggaaagtacagatatgggatgcgtcgcgttgcaagagaacaagaacaatggaaggacatagactaagagttggagcactggcgtggggatcatctgtactgtcatctggtagtagagacaagagtattcttcagagagacatacgttgtcaagaggatcatgtcagtaaacttgcaggtcacaaatcagaagtatgcggactcaagtggtcttatgacaacagagagttagcttctggtggaaacgacaatcggctttttgtatggaaccaacattcaacacaaccggttttgaaatatagtgaacacacagcagcggttaaagccatagcttggtcacctcatgttcacgggcttcttgcttctggtggtgggactgctgatagatgcatacgtttttggaatacaactacgaatactcatttaagttccattgatacttgcagtcaggtatgtaatctagcatggtctaagaacgtaaacgagctggttagcacgcacggatactcccaaaaccaaatcatagtctggaaatacccaaccatgtccaaaattgcaactctgacaggtcacacataccgtgttctgtacctagcggtctcacctgatggacagactattgtaactggagcaggagatgaaaccttaaggttctggaatgtcttcccatccccaaaatctcagaacacggatagtgatattgggtcgtcattctttggtagaacaacaattcgttgaaaacatctttcaaaacacatacagagacacacaaagacagatacatgtttctttcattacttcaacagcagcagcctcttgagttggtcctctcaaccaacaatttttcacacggagtcaaaacaaattatttttatcacacgggatgcaaagaagatctaacccctttgatacaaaataccatctgggttcgtcaagagatgcacaacaaaattttcttataagtgtatatctttttcttattcatacaacaagttttgttgaacacattaattaccattttataatgag

SEQ ID NO: 255 - DNA, 1904 bp, Brassica napus
atgataacggcgacggacttctaccacgtcatgacggcgatggttccgttatacgtagccatgatcctcgcttacggctccgtcaaatggtggaagatcttcacaccgacccaatgctccggcatcaaccgtttcgtggctctcttcgccgtccctctcctctctttccacttcatcgccgccaacaacccttacgccatgaacctccgtttcctcgccgccgactctctccagaaagtcatcgtcctctctctcctcttcctctggtgcaaactcagccccaacggctccttggactggaccatcactctcttctccctcaccactctccccaacaccctcgtcatgggcatacctctcctcaaaggcatgtacggcgacttctccggcgacctcatggtgcagatcgtggttctccagtgtatcatatggtacacgctcatgctctttctcttcgagtaccgcggcgcgaagcttctgatctccgagcagtttcccgacacggctggctctattgtctcgatccatgttgattccgacattatgtcgttagacggtcggcagccgcttgagaccgaagctgagattaaagaagatgggaagcttcacgtcactgtccgtcgttctaacgcctcgaggtctgatatttactcgagaaggtctcagggcttgtcggcgactcctcggccttcgaatctcaccaacgcggagatttattcgcttcagagttcgagaaacccaacgccacgtggctcgagttttaaccatactgatttttactcgatgatggctgctggtggtggccggaactcgaacttcggtcccggagaagctgttttcggttcaaaaggacctactcctcggccgtctaactacgaggaagacggcggagctaaaccggcggcgggagctgggaggtttccttaccacggcggcggaggtgcggcggcgaagggaaacgatgggaatggaagagaccttcatatgtttgtgtggagctcaagcgcttcgccggtctcagatgtgttcggcggaggagtaaaccaccactccgattacgccgccgctacgaatgagcaacacaaggacgggaatagtaacgatagccaatatgtagagagggaagatttcagttttggtaataaagatgatgatagcaaagtcttggccacagacaacaacataagcaacaaggcgcagcagcagcagccaaaggttatgccaccaacaagtgtgatgacaagactcatactcattatggtctggagaaaactcatccgtaatccaaactcttactctagtttattcggcatcacttggtccctcatctctttcaagtggaacattgaaatgccagctattatagcaaagtctatctccatactctcagatgcaggtctaggcatggctatgttcagtcttgggttgttcatggcgttgaacccaagaataatagcgtgtggaaacagaagagctgcttttgcggcgggtatgagatttctcgccggacctgccgtcatgactgtcgcttcctacgccgttggcctccgaggcgttctcctccgcgttgccatcatacaggcagctttgcctcaaggaattgtaccctttgtgttcgcgaaggagtataatgtgcatcctgacattcttagcactgctgtgatattcggaatgctgattgcattgcccataacccttctctactacattctcgtggggctatgatgagatactaccaagtatgaaaagaaaaaaagacaaggaccctctttaaatcttttgggagattatggaattagagaagagcaatgtccattttgttgaatacccacaaaattacatcaatagcacctttagataagcttctaaatgaatttggagaaagaagctcttgaaggaaagaa

SEQ ID NO: 256 - DNA, 1341 bp, Brassica napus
atggaaacaaatatgttcatcaataacccatctgcacacttaccgttctcttacaccttcactagtagcagcaacagtagcacaaccactagcacaaccacagattcaacctccggtcagtggatggacagtcggatttggagcaagctacctccttcgcttcttgaccgtatcatcgcttttcttccacctccagcgtttttccggtcacgttgcgtctgcaagagattctacggtctacttttctccaacactttcctcgagatatatctacaactacttcctccccgacacaactgtttcctcttcttcaaacacaaaaccctcaaaagctacatctacaagagaggaggtggaggaggagcaaacgatgatggttccaacaaagctgaaggcttcttgtttgaccctaatgaaatcagatggtatcgtctctcttttccttacatcccttcagggttttatccttcaggttcatctggagggttggtgagttgggtctctgaagaagctggtctcaaaaccattctattatgtaaccctcttgttggatccgtgagtcagttgccaccaatgtcaaggccaaggctgttcccttcgataggtctctcagtaactccaacttccattgatgttaccgtcgccggagacgacctcatatctccttacgccgtgaaaaacctctcctcggagagtttccacgtcgacgccggaggattcttctccctttgggcgatggcttcttctctgccgcggctttgtagcttggaatcaggtaagatggtttacgtgggaggcaagttttattgtatgaactatagcccttttagcgttttgtgctatgaggtcacggggaaccgttggattaagattcaagctccgatgaggaggtttctccggtctccaagcttgttagagagcaaaggaaggctcgttctcgtggcggccgttgagaaaagcaagcttaacgttcccaaaagccttaggctttggagtttgcagcaagataacgccacgtgggtcgagatcgagaggatgcctcagccgctatacacgcagtttgcagtggaagaaggcgggaaagggttcgagtgtgtcggaaaccaagagtttgtaatgattgtgttaagaagggcttcacttcagttgctgtttgatatggtgagaaagagttggttgtgggtcccaccgtgtccatactccggtggcagcagtagcggtgttggctcaggtggttcagagggagaggtgctgcagggttttgcttatgacccggtacttactacaccggtggttagtcttcttgatcagttagcacttccatttcctggagcctgttag

SEQ ID NO: 257 - DNA, 1341 bp, Brassica napus
atggatcctgaaggtttcacgagtggcttattccgatggaacccaactagagtaatggttcaagcaccaactccgattcctccaccgcagcagcaatcgccagcaacaccgcagaccgcagcgtttggaatgcgactaggtggtttggagggtttgttcggtccttacggtgtacgtttttacacggcggcaaagatagctgagttaggttttacggcgagcacactggtgggcatgaaggacgaggagcttgaggatatgatgaatagcctctctcatatctttcgttgggagcttctcgtcggtgaacggtacggcatcaaagctgccgttagagctgaacggagacgattgcaagaagaggaagaggaggaatcgtctagacgccgtcatttgctactctccgccgcaggtgattccggcactcatcttgctcttgatgctctctcccaagaagggttgtcacaggagccggttcagcaccaagatcagactgatgcggcggggatcaacggcggaggaagaggaggttattgggaagcagggcagacgacaataaaaaagcaacagcagagacgcagaaagaaagcgattgtaacgtcagtggaaactgatgatgacggcaacgaaggtgaggatgacgacgggatggatattgttaacggaagtgggtcagggatggagagacaaagggagcacccgtttattgtaacggagccaggggaagtagcacgtggcaaaaagaacggtttggattatcttttccacttgtacgaacagtgccgcgagttccttcttcaggtccagaccattgctaaagatcgtggcgaaaaatgccctaccaaggtgacgaaccaggtgttcaggtacgctaagaaatcgggggcaaattacataaataagccaaaaatgcgacactacgttcattgttacgcactccattgcctcgacgaagaagcttcaaacgctctccgaagagcgtttaaagaacgcggtgagaacgttgggtcgtggcgtcaggcttgttacaagccacttgtggacattgcttgtcgtcatggctgggatatagacgccgtttttaacgctcatcctcgcctttccatttggtatgttcccactaagctgcgtcagctctgccatttggagcggaacaatgcggttgctgcggctgcgactttggttggtggtattagctgcgagggatcgcctgcgtctggacgctttggggtttaattagttcatgagttgttgtggtttacttgttcgttatcttaattaattatctactttattagaacagaactacaaataagaaataactctaacacttacaactta

SEQ ID NO: 258 - DNA, 3936 bp, Brassica napus
aaatccttcgcctctttcagctgaggagagagaaactgaagctcaggccttgtgaaatcgatctctctctctttctcttcttcttcatggtaagtataagcttcacgcttgtgagatttgttaatggaatctagctctttggatttatgtttaagccgtgtagcttttctgggtattttgctatttttgttcatgtagtgtttcccgatttaacaccttatattacactaattactgaaatggatatatattggtaggagagtattaaattatttataacctccattttcatttttttttaatttaattattgctatgaataattgaaacccagtttttttggattgatgatggtttcgcagatctggtgattgatttggtgggttttgcgcatctgagttgaaaagacatgtcttctctcagtagggagctcgtgttcttgatcttacagtttctagatgaagagaagttcaaagagactgttcataagctggaacaagagtctgggtttttcttcagtatgaagtattttgaggatgaagtgcacagtggaaactgggatgaggtagagaagtatctctctggttttaccaaagttgatgataatagatactccatgaagatattcttcgagattaggaagcagaagtatctcgaggccttggataagcatgatcgtccaaaggctgttgaaattttagtcaaagatttgagagtgttttccacttttaatgaggagcttttcaaggaaatcactcagctcttgaccttagaaaacttcagggagaacgagcagttatccaagtacggagacacaaagtcagccagatctatcatgttggtggaacttaaaaagttgattgaagcgaacccgttattccgtgataagctgcagtttcctacccttagaaattcacggctgagaacgctgattaaccagagcttaaactggcaacatcagctttgtaaaaatccaaggccaaatcctgatataaagactctctttgtggatcactcctgtcgcttaccaaacgatgcacgagcaccatcccctgtcaacaacccgctgcttggatcactaccaaaagccggaggatttcctcctttaggcgcacatgggccatttcaaccaacaccttctcaggttccgacaccccttgctggttggatgtctagttcttcctctgttcctcatccagctgtgtctggaggagccatagctctaggttctccatccatccaagcagccttgaagcacccgagaactcctccaagtaattccgctgtagactatccatcaggtgattcggaacatgtctcaaaaagaacaagacctatgggaatctctgacgaggtgaatcttggtgtgaacatgttaccgatgacattcccgggacaggcacatggtcatacccaagccttcaaagcacctgatgacttgcctaagacagtagcacgaactttgagccaaggctcatctcccatgagcatggatttccatccaatcaaacagactctcctactagttggtacaaatgttggggatattgggctctgggaagtcggttctcgagaacgtctagttcaaaagactttcaaagtctgggacttgagtaaatgttcaatgcccttgcaggctgctttagtgaaagaacctgtcgtttctgtcaaccgtgtgatttggagcccagatggttctttattcggagttgcttattcgagacatattgtacagctatactcttatcacggtggtgaagatatgagacaacaccttgagattgatgctcatgttggtggtgtaaatgacattgcattctccactccaaacaagcaactatgttttactacttgtggtgatgacaaaaccatcaaggtctgggatgctgcaacgggtgtaaaaaggcatacttttgaaggccatgaggctcccgtttactctatctgccctcactacaaagaaaacattcagttcatcttttcaactgcgcttgacgggaaaataaaagcgtggctatatgataatatgggttctcgggttgactacgaagctcctggtcgctggtgtacaacaatggcctacagtgctgatggaactaggctattttcttgtgggacgagcaaagatggggattcatacatagttgagtggaatgaaagcgaaggagctgttaagagaacttatcaaggattccacaagcgttctcttggtgtcgttcagttcgatactactaaaaaccgctatcttgctgctggtgatgacttctccattaagttctgggatatggacaatgtccagctgttgactgccattgatgctgatgggggtcttcaggcaagcccacggatccggtttaacaaggaaggctctctcttggccgtttctgccaatgacaatatgattaaggttatggcaaacacagatggtttaaggctattgcacacggtcgacaacttatcttctgaatcctccaagcctgcaatcaacaacattgcggtggcagagagagctgctgagagacctgcctcggtagtttccatccctggaatgaatggagattcacggaatatggcagatgtgaagccagtgatcactgaagaatcaaatgataagtctaagatatggaagcttactgaagtcggtgaaccctctcagtgccgctccttgagactccctgagaatatgagagtcaccaagatatcgaggttgatcttcacaaattctggaaatgcgatattggcattggcatcaaatgccatccatctgctttggaaatggcagcgaaatgaccgtaacgctactggaaaggcaacggcttcgttacctcctcagcagtggcaaccagcgagcggaatcttaatgacaaacgatgtgactgaagctaattcagaggaagctataccgtgttttgctttatccaagaatgattcctatgtgatgtcagcatctggaggaaagatctctttatttaatatgatgacgtttaagacaatggctactttcatgccgcctccgcctgctgcaacgtttctggcttttcaccctcaggacaacaatattattgcaattggaatggatgatagtacaatacagatttacaatgttcgcgttgatgaggtcaagagcaagcttaaaggacattccaagagaataaccggcctagccttctccaacgtactaaacgttctggtttcgtctggagcagacgctcagctttgtgtatggaacacggacggatgggagaagcagaggagcaaggttctgcaagttccacagggaagatcaacgggtgctctttcagacacgcgtgttcagtttcatcaagatcaagtgcacttcctcgtggtccatgaaactcagctcgctatatacgaaacaaccaagcttgaatgcatgaaacagtggcctgtgcgtgaatcatcagctccaatcactcatgccacgttctcatgtgatagccaattgatatacgcaagtttcatggatgctacaatatgtgtattcacctctgcaaaccttcgattgcgttccagagtcaatccctctgcgtatctgcctgcttctctcagcaattcgaacgtccatccgctggtgattgcggctcatccgcaagaatccaatatgtttgctgtgggtctctcagacggtggggtccatatattcgagccacttgagtcagaaggtaaatggggagtggctccaccacctgagaacggctcatccagcgctttggcgtctacaccttccgcatccgatcagcctcagcgatgatatgaaacagtacctgctccggtgaatgtattaatgtaacatatatctatagcagggtgaaacagtttcctaattggttgattcgttggcacttttgtttttgaatagtgaaataattcgctgttgcttgcttcttatggcttttaaagtttggatgaatctcc

SEQ ID NO: 259 - DNA, 1863 bp, Oryza Sativa
atccctcccagtataagccaaaccaatccatagaggaggaagaggaggaccaggtggtggcacacctaagctttgtgcagtgccattcacgcacctgcagcttccagctttgccacatggaccagccggcgccggcgccggagccgatgctgctcgacgcgcagccgcccgccgccgtcgcctgcgacaagaagcagcaggagggggaggcgccgtacgcggaggggaatgacgcggtgaccgggcacatcatctccaccaccatcgggggcaagaacggcgagcccaagaggacaattagctacatggcggagcgcgttgtgggcactggttctttcggtatcgtctttcaggctaaatgcttggagacaggagagactgttgccattaagaaggtattgcaggaccgacggtacaagaaccgtgagcttcagcttatgcgcgccatggaccaccccaatgtcatctccctgaagcattgcttcttctcaaccacaagtagggatgagctgttcctcaatcttgtcatggaatatgttccagaaacactctaccgtgtgcttaagcactacagcaatgccaaccaccggatgccacttatctacgtcaagctttacatgtatcagttatttagggggcttgcgtacattcatactgttccaggggtctgtcatagggatgtgaagccacaaaatgttttggtggatcctctaactcatcaagtcaagctctgtgactttgggagcgcaaaaacactggtcccaggtgaacccaatatatcatatatatgctcacgctactaccgagcaccggagctcatatttggtgcaactgaatatactacatcaatagatatatggtcagctgggtgtgttcttgcagagctactccttggtcagccattgtttccaggggagagtgcagtcgatcagcttgtagagataattaaggttcttggtacaccaacccgtgaggaaatacgttgcatgaacccgaactatacagagtttaggtttccacagataaaagctcacccttggcacaaggttttccacaagaggatgcctcctgaagcaatagacctcgcttcacgccttcttcaatattcaccgagtctccgctgcactgctcttgatgcatgtgcacatcctttctttgatgagctgcgagagccgaatgcacgcttgccaaacggacgtccatttccaccactattcaacttcaaacacgaactagcaaattcttctcaagagctcatcagcaggctcataccagaacatgttcgacggcaagctacccacaacttcttcaatactgggagctaaaaatgctaaatgcacaccaccagaccttttgttggatcgttttcgcggaaccggtgaagttcacatgaaggctgagtcagatgattcttcgaatccccgcaaaacaagaagaatagaaaatatgattcctcagatgatgatatgcaaatgcttcgttggaagttcaattcaatcatcgaagaagaacaacattgtaaatcgagaagtttttgcatcgcgagtttggtagtgaaaccgggatcagctggtatgacggaggaaaccgaaatgtttagatccatgactgagttttctttcattttttttgcccaattgtaacagaagaatatagttccctaatgtaggcgtagttgtaacctgtaaactgccactgttttgttcacattccatgatgtaaatgccaccatgcctctgatgaataactctccttgtaaccttgttccttccatccttgactgtttaccttaaagccgtggacagtgtacactgtacatgtaccgtgctacacggaaggacatatttgaattttttttctctc

SEQ ID NO: 260 - DNA, 2112 bp, Oryza Sativa
aggtctcatctcatggtcgcctagccaagccaagccaagccaacctcctcgccgaggagagagaagagaggagaggagacgagaggagagagaagccgaggaggaggagagagagagagaggaggccgctccatttgcccccccccccatggccacgctgccgggcgggccccaccccaccggaggcggcgccgcggcggacccgatgcaggtcgaccagccgcgctccgccgcggccgccgcagcggtcgcccccgccggtgaaaagcacggtgcttctcttatggaagggagtgatcctgtcaccggccacataatctccacaacgattggagggaagaatggagaacctaaaaggacgattagctacatggcagaacgagttgtgggaactggatcatttggaatcgtctttcaggcaaaatgtttggagactggtgagactgtcgccattaagaaggttttacaggacaagcgttacaagaacagggagttgcagattatgcgatcaatggatcattgcaatgttgtttctttgaagcattgcttcttctctacaacaagcagagatgaacttttccttaacctggtcatggaatttgttcctgagtcactgtatcgtgtgttgaagcattatagcaacatgaaccaaaggatgccacttatatatgtcaaattgtatgtttaccagatattccgtggtttggcttacattcatactgtacctggagtttgccacagggatgtgaagcctcagaatcttttggtcgatcctcttactcaccaagtcaaaatatgtgattttgggagcgcaaaaatgttggttaaaggtgaagcaaacatatcgtatatatgttcacgttattaccgtgctccagaactgatatttggggcaaccgaatacacgacatcaattgatatatggtcagctgggtgtgttcttgctgagttgctccttggccagcctctctttcctggtgaaagtgcagtggatcagcttgtcgagattataaaggttcttggtactccaacacgtgaggaaatccgctgcatgaatcccaactacacagaattcagatttcctcagattaaagctcacccatggcacaagattttccacaagcggatgcctccagaagcaattgaccttgcatcacgtcttctccagtatgcaccaaatctacgatgcactgccctcgaagcatgtgcacattcattctttgatgaattgcgagaaccccacgcaaggttgccaaatggacgtccattccccccactgttcaactttaagcaagaactagcgaatttatcgccagagctcatcaacaggttgataccagagcatgctcggtgacattgtgggttcaatttcttgcctgctgccggaccataggacagctggatggtatttttactttgcgaagccgatgcttgtttgtgccaaagggcaacttgcatgttctcacatttaaggtgtagaatctgaccattattgggaagctgaacatgagctggcgccaatgtgttatatgaggtgggtgtgctaggcacagccaacccatgttaatttaatgcttctcctccattattaggaggccatggtggtcaggattagccaagtactgtggggatagctggagggaatggggatggtgtattgttaagctattgaaagggatcagatcccaagtactgtactactttctcccacgattaatgttgtagtgcccctgtaagtgtttctcatgccctattgtcgatgtaattgtgtaaatgttcctaatggaaaaatctcttgttatgataccccatgcccaaacttgtttaccccccccccccctactggtttcctctaccatatggttcagagaactttcctcatctgttggctgcaaagatgaatgttgtgattatcattgtcactggaatactaggataaaattgttgataaatgagtaatatatttgaggtctgcatttgtgagttgtgtaaggatttaaggcaggtgtctgcaccaatcctatattgagagaataaaagcaacagttgagaaccaattggttgtgtcggctggtcctttcatcaatagagatgctgtctgtttagtgtggt

SEQ ID NO: 261 - DNA, 2031 bp, Oryza Sativa
gagaaaaaaaaagaaaaaaagagcgtgtcgctgtctactgatgatgatggcttcctcacggtagcagcagcagcagcagccgcgccgaagcagcctcctcccatcaccgaggagagagagagagagagagagtagtgagagaggaagacgagagagccgcctccgcggccatcgccgccgccgcagcagcggggccactaccccgactgccccctcccctcctcccatggccgcgatgccaggtgggcccgaccttgccggggccggtggcgccgtcgccgtcgccgtcgacgcgatgcaggtcgacgacccgccgcgtgcgtccgccgaggagaagcatggtcccactataatgggaggaaatgatccagtcacaggtcatataatttcaactactattggagggaagaacgatgagcccaaaaggactattagctatatggctgaacgagttgttggaactggatcctttggtgttgtattccaggcaaaatgccttgagactggtgaaactgttgccattaagaaggtcttacaggacaaacgatacaagaacagagagttacagataatgcgatcaatggatcattgcaatgtcatctccctaaagcattgtttcttctctaccacaagcagagatgaacttttccttaacttagtcatggagtttgttcccgagtcactttatcgtgtcctgaaacactacaaagatatgaagcagaggatgccacttatatatgtcaaactttacatgtatcagatattccgcggattagcttacattcacactgttcctggagtttgtcaccgagatataaagccacaaaatatcttggttgatcctcttacccaccaagtgaaggtctgtgattttgggagtgctaaaatgctgattaaaggtgaagcaaatatatcttacatatgctcacgttactatcgtgctcctgagctcatatttggtgcaactgagtacacaacatcaattgatatatggtctgctggatgtgttcttgctgagctgcttcttggtcaacctctgtttcctggtgaaagtgcagtggaccagcttgttgagataattaaggttttgggtactccaacgcgagaggaaatccgttgtatgaatcccaattacacagaattcaaatttccgcagataaaagcatgcccatggcacaagatcttccacaagcgaatgcctcccgaagcaatagatcttgtgtcccgtctccttcagtattcgccaaatctgcgatgtactgcgctggaggcatgtgctcattcattttttgatgagttacgagaaccacatgcaaaactgccaaatggccgtccgtttccgcctctgttcaactttaagcaagaattagcaaatacacacccagagctcgtgagcaggctgttaccagaacatgcgcagcggcattcaggattttaattcattgttttgcactggaccataggacgaagtgtggtatgacgacatttacacttgtctgctcatacctgtgtatgccaaagggcaaataacatttctcaccttaaggttttagaacctaatcatcttcttgcaaagctgaaaatgggctcccctgacaaggtagtgtgcggtgtgccgtactacaatcaaatgttaaaccttgaggaggccattgtgtccagtgttctgccaagaggagcccgaatagctggagggatggtgggtgtattgttaagctgtggagggtgacttttatgttgaaacttcctttgctgtatgttccatgcctgtaccgcacctgcatccattcaacctcatattcacaactgatgtaatcatgataaaattgaatgtgtcaatgatggtcgattcgtatgccattatatgcgaattgactgttgtttctattatgatcaacttatcctgttattactgatgggaatgcccgtgtggccgtgtggccgtgtgtgctgttgggtgggcatatggtgtttgttattatatgttgaaatgaatcagaaggttgccatatttgctcgtaaattacagaa

SEQ ID NO: 262 - DNA, 2235 bp, Oryza Sativa
ctcccccctcatctcccccatccttccattccatccatggcatcacctccataaatttctctctgctcctccatgcccttgcctattcttttttaccagaaaaggaaaagtttggaaggagaagagcagctgccctccactacctcactccactctccccccctacctaacctacttgctccacaccagagagagccccaaaccatctcatctcatcctcttccgattccctgctcgcccataattattccaagagcactggagcctgttgatctgcttgctccaagaatttttctttcatctctgtgggattttggctccagctgttgctgaagtgatgctggaggaaacggcattgcaatggcgggctgatcttctgcaagcaatggagtgaatactggtctgtttttcttgtcctgacctggggaatctcgggtagtgggggatggcctattctggactaaggcatggcggcgttgggagctcctctcggccgggacatggattcaagggcccggctagttcggttgaatgtctaggaagggagatgctggaaatgcaattgagggattccaaaccagatgttggtgatgaaaagaacactgaacgagatgtagtcgacggctctagcgctgaagctggtcacataatagctactacgatccgtggccgaaatggtctacctaaacagtctgtcacttatattgctgagcatgtggtcggaactggttcttttggggttgtatatcaggccaaatgtcgagaaacaggagaaattgttgccattaaaaaggttcttcaagataaacgttacaagaacagggaattgcaaattatgcatatgctggatcatcctaatattgttggtcttaagcattacttcttctcaaccactgaaagggatgaactttacctcaatcttgtccttgagtatgttccagagacagtaaaccgaattgcgagacagtacagcagaatgaatcaacgggtgcccctcatttatgtcaaattatacacttatcagatatgccgagcacttgcttacatacataactgtgttggcatctgccaccgtgatataaaaccacagaatgttcttgttaacccacatacacaccagctcaaaatatgtgattttggcagtgcaaaagttttggtcaaaggagagccaaatatctcctacatatgctcaagatattacagggcaccagagctcatatttggtgcaactgaatatactactgccattgatttgtggtctacaggctgtgtcatggcagagcttctgcttggacagcctctgttccctggggaaagtggagttgatcagctggtcgagattatcaaggttttgggtactccaacaagggaagagatcaagtgcatgaatccgaactacacggagttcaaattccctcaaattaaggctcatccatggcacaaggttttccaaaaaaggcttccacctgaagcagtggaccttgtaagcaggtttctgcaatactcaccaaatcttcggtgcaccgctatggaagcctgcatgcaccctttctttgatgagttgagagatccaaacactcgtctacctaatgggcgtcctcttcctcctctcttcaacttcagaacacaagagctaaatggcatccctccagaagccatcgaacgtctggttcccgagcatgcgagaaggcagagtttgttcatggcgctgcgcacctagttctctagctcttcttttttcgcagtttttcttcctgagggaagctctgtaaaggtgtagtggcttctatgtgcccatctcagtgtggataaggtctttggctagagttgttgttgttgttgttcatggcaggatgtgatgtgagtgaggttggagaagaagaggcttgtgctttggtgtgcttgtgcagttggtttgaggttggaatctatgcttcagggttccaggctgtgtaactcctccagttctctttggactttggtttgaagattgtgtgcagtaacagtgcttggttcaacttcagttcagagtggtctggtgatgataaagaaaatcattcagaaagttttgtttatgttcagtgcttcaccattcaatactgtcgatgcaggtgcagatatgttcaacttcagagttttgtttatgttacatgcttcaccattcagaaagtgtgcacaaaggatctcagttttcttataaatcttcagaagattctcaatagaatgatctctcaa

SEQ ID NO: 263 - DNA, 2028 bp, Oryza Sativa
gaaatcatttcggtttcggagagagagagagaggatttttttttccttcggcttatgtagtattgcgctgcgtcccgacaagcaaaagcaagaggaggaggccgcggctagcgagcgagcgagagagaggggagaagaagaggtgggacagccgggagatccatccctgtggagaggagggagggaggaaggaggcgttggaggaggagaggttgaccgatagatccattgcggagttgagtgttgatgcaaagctgattcgccatcgtttagctttttataagagatgggttcagtaggggttgcgccgtctgggttaaagaacagcagtagcaccagcatgggtgctgagaagttgcctgatcagatgcatgatctgaagataagggacgataaggaagttgaagcgactattattaacggcaagggaacagaaaccggccacataattgtcacaactactggtggcagaaatggtcagccgaaacagttagctacatggctgagcgtattgtagggcaaggttcatttgggattgtcttccaggcaaaatgtctggagacaggtgagacagttgctatcaagaaggttcttcaggataagcgctacaagaaccgtgagcttcagaccatgcgccttcttgaccacccaaatgttgtagctctgaagcactgtttcttctctacaactgagaaggatgaactgtatctaaacttggttcttgagtatgtgcctgaaactgttcatcgtgttgtgaagcattacaacaagatgaaccagcgtatgccacttatctatgtgaagctgtatatgtaccagatttgtagggcattagcttacatccataatagcatcggagtttgccacagagatatcaagccacagaatcttctggtaaacccacatacccatcaactcaagctatgtgactttgggagtgcaaaagttctggtcaagggagaaccgaacatatcgtacatttgctcccgatactatagggctccggagctcatatttggtgccaccgaatacactacagctattgacatctggtctgctggatgtgttcttgctgaacttatgttagggcagcctctgtttcctggtgaaagtggtgtagaccaacttgtggaaatcatcaaggtccttggaacacctacaagggaggaaattaaatgcatgaatccaaactataccgagttcaagtttccacagattaaagcacacccatggcacaaggtattccataaaaggttgcctccagaagctgttgatcttgtctctaggctgctccagtactcacccaacctaagatgcactgctgtggaagcacttgttcacccattctttgatgagcttcgagaccctaatgctcgccttccgaatggccgctttttgcctcctctcttcaacttcaagcctcatgaactgaaaggaatcccatcagatattatggcgaaattgatcccagaacatgtgaagaagcaatgctcctatgcaggagtatgagacagcttccgcacgacccccctggaaatttccatgacaagtgcccatttcctcccccctggacgacgatggatcgtcagcatatgcgtgcatgatggttggtgaagatgtgaagttacgttgttgttgtatgaccaccttgttgaccagtgtagttgagtagcagtatgttgcgatggcgaaactttgacatgtaaccggtgcacccacaccatccctcccctactaaccctcacccacctgagaattgagaattcccatagctgatgatctgtaatatgttctagagcagtttaagaatgtatttattatggtgtagttgatccatatgttgggatcctcctcgtcgattttcttggttctttgtgccctagactgctacctggtttttagactgttctgaaaatgctgctagtaccttctatctactgtacttgtttgctccttggtgctattgctccagcctcagctatgaggatgctctggcatatgaacgtatggacaagttcgtcgatgacc

SEQ ID NO: 264 - DNA, 2095 bp, Oryza Sativa
ctgtgtattatagaaggcagcgaagctcctccttcctctctccctccgaatcctcccccgcattccgcgccggagctgaggagggacagcgagccagcgagggaggtggggcaatccagcgagcgccagatcgtgccgccagccccgctccgtcctctctccggcgaccctccgccccgcctgatcccgtggtggatcaactacaactcatctttaggaaagcctcttgaacattagccttgtgtgcctttcaacagtatggcctcggtaggtgtggtgcgttcttccttggggtttcagaacgaaacaagtacaagtggcgatgccgaccgacttccgaatgagatgagcaatatgagtataagggatgataataaggacattgacgacatagttgtcaatggcaatgggacagaacctggtcatgttattgtgacaagcattgatggaagaaatggacaggctaaacagaccattagctacatggccgagcgtgtcgtaggtcatggatcctttggaactgttttccaggccaagtgcctggaaaccggtgagactgtggctataaagaaggttcttcaagacaagagatataagaaccgtgagctgcaaacaatgcgagttcttgaccacccaaatgtggtgtcactaaagcattgttttttctcaaagactgagaaggaggagctttacctcaatttggtgcttgagtatgtgccagagactgctcaccgtgtaattaaacattacaacaagatgaaccaacgcatgccattgatatatgcaaaactatacatgtatcagatatgcagagctttggcgtacattcacaacaccattggcgtgtgtcacagggatatcaagccacaaaatcttctggtgaacccacatactcatcagctgaaattatgtgacttcggcagcgcgaaagtcttggtaaaaggagaaccaaatatttcttacatctgttcaaggtactacagagctccagagctcatatttggtgctactgaatacacaacagcgattgatgtttggtctgccggttgtgtgcttgctgaactcctcctggggcagcctctattccctggcgacagtggcgttgatcagcttgttgaaatcatcaaggttctgggtacccctacacgagaggagattaagtgcatgaacccaaattacaccgagtttaaatttccgcaaatcaaagctcacccatggcacaagatcttccataaaagaatgcctgctgaagcagtcgatctcgtctccaggcttttgcagtattcaccatacctccggtccactgctgtgagtgttgtcgttgcactatttgagccaacaccattttttagagaaagttttagttcttggcatcactattgtgttacatttttctaattacttcatcatacaaacatgcactgccttgccaagtactagtagttacagattgtgcatttctttatttgccattacagtcggaagcattgatccatcccttcttcgatgaactccgtgatccaaacacccgcttaccgaacggccgtttccttcctcctctcttcaacttcaagccccatgaactgaagggtatgccaatggaattcctggtgaagcttatccccgaacatgctcgaaagcaatgcgcgtttgtaggatggtgatttctgaggtcagcatgaaaactagttcagaatttcttcaccgtcctccattagaaagcagagatgaaccctgtgtgcagccatttgggaaagctggtgcatatggaagtggaactacatttttttgtccgagattctgacgccgcgtattcttttcccccctcccactttgctgctgccggtgtaaccaaaaaatcatccacggttctgtaaagttgatgaagaagagtgtaaaatcaggttgaaaactgaattcgatcggtttgtcaagattgtagcaacatgcaaggaaggatgttgcacactttgtatggcaatgttcgttcggtccaaatatttggacatggatcgagaggctattcatttaattgtacttgctgctacatgttcttacatatcagtaatcttctgagaagcttgtgaaagaaagc

SEQ ID NO: 265 - DNA, 1891 bp, Oryza Sativa
atggagacaaaacccaaacacccccctaaataactgaagcaatcacacaccttctctgcaaaaatcccaatctaccaccgcacccaacgaagcttaagacagtggaataaagcagagagagaaatcaaagcaagaaagagagagaagaagcgaggcaagagtcaagaccatctcccatggccagtggtgatagtagtagtagtagtagtatataaaaggggagcgcgccacggcttgccaatccgccgcgctggtgtgatgctgcgatcgacgcatccgccgcccagtagcccgagcagcagcagcagcggcggcggcgggggcggggggtcgtcggcgtcgtcgagctcggagaagacgatggtgggcggcgggggaggagggggaggagggagcgggtcggcggcgccgagcggggcgaagctgctgcagatcctgaacgtgcgggtggtggggagcggcgagcgggtggtggtgctgtcgcatggcttcgggacggaccagtcggcgtggagccgcgtgctgccgtacctcacccgcgaccaccgcgtcgtgctctacgacctcgtctgcgccggcagcgtcaacccggaccacttcgacttccgccgctacgacaacctcgacgcctacgtcgacgacctgctcgccatcctcgacgcgctccgcatcccgcgctgcgccttcgtcggccactccgtctccgccatgatcggcatcctcgcctccatccgacgacctgacctcttcgccaagcttgtcctcatcggcgcctctccccggttcttgaacgacagcgactaccacggcgggttcgagctggaggagatacagcaggtgttcgacgcgatgggggcgaactactcggcgtgggcgacggggtacgcgcctctggcggtgggcgccgacgtgccggcggcggtgcaggagttcagccgcaccctcttcaacatgcgcccggacatctccctccacgtctgccagaccgtcttcaagaccgacctccgcggcgtgctcggcatggtccgcgccccctgcgtcgtcgtccagaccacccgcgacgtctccgtcccggcctccgtcgccgcctacctcaaggcccacctcggcggccgcaccaccgtcgagttcctccagaccgagggtcacctcccccacctcagcgcccccagcctcctcgcccaggtgctccgccgcgctctcgcccgacgatgtgggcaatcttgacactgttttaggatgctctacggtgcgcgtctgtgtgtgagagtggttgtgtgggctgtgggtgggggccttgatggggagccaacgtgatgatctgcgtgatgcctagcttttgatacggtagttgtggtgttgttagctggccaaaccaaagcctttaagcttgtggacaataatcaatgctgatggataaataacagttgatcatggagtattagcatttggcctatctagtagtccgcatattcttatccacaagtgataagtatggattatgtctgcaatcagcgtcttgctagttgctactatgaacgaaccaagccaaactaatccaatcgagttcgtgctccgtaatacagtttcagccaattgtcacgtaacgccaacttttgtgagccccatcgaagccacatcaatcagtcacacacacatgtacacacgagctgtgagcacaccctggttatccatgtagtatgatccatggatcatcttgctggatgtgttgcggcagagaaaccagcacagtgataagcagtgttacaactttttttttttttgcggggaagcagtgttacaacttgcaagcctgttgctacagtgcactttcattatttcatatttgttggattgaaatcaagcctagctcagctgggtagtttcgttg

SEQ ID NO: 266 - DNA, 1716 bp, Oryza Sativa
ttccgtctctttcctctctcttctctctccccctctcctggaggagagagaggagaagaggagggggggccgcgccaagagccacgcgcgctacagtctccttcccacccgcgaccgcgagcaatggagatggccagtggaggaggcgccgccgccgccgccggcggcggagtaggcggcagcggcggcggtggtggtggaggggacgagcaccgccagctgcacggtctcaagttcggcaagaagatctacttcgaggacgccgccgcggcagcaggcggcggcggcactggcagtggcagtggcagcgcgagcgccgcgccgccgtcctcgtcttccaaggcggcgggtggtggacgcggcggagggggcaagaacaaggggaagggcgtggccgcggcggcgccaccgccgccgccgccgccgccgcggtgccaggtggaggggtgcggcgcggatctgagcgggatcaagaactactactgccgccacaaggtgtgcttcatgcattccaaggctccccgcgtcgtcgtcgccggcctcgagcagcgcttctgccagcagtgcagcaggttccacctgctgcctgaatttgaccaaggaaaacgcagctgccgcagacgccttgcaggtcataatgagcgccggaggaggccgcaaacccctttggcatcacgctacggtcgactagctgcatctgttggtgagcatcgcaggttcagaagctttacgttggatttctcctacccaagggttccaagcagcgtaaggaatgcatggccagcaattcaaccaggcgatcggatctccggtggtatccagtggcacaggaacgtagctcctcatggtcactctagtgcagtggcgggatatggtgccaacacatacagcggccaaggtagctcttcttcagggccaccggtgttcgctggcccaaatctccctccaggtggatgtctcgcaggggtcggtgccgccaccgactcgagctgtgctctctctcttctgtcaacccagccatgggatactactacccacagtgccgctgccagccacaaccaggctgcagccatgtccactaccaccagctttgatggcaatcctgtggcaccctccgccatggcgggtagctacatggcaccaagcccctggacaggttctcggggccatgagggtggtggtcggagcgtggcgcaccagctaccacatgaagtctcacttgatgaggtgcaccctggtcctagccatcatgcccacttctccggtgagcttgagcttgctctgcaggggaacggtccagccccagcaccacgcatcgatcctgggtccggcagcaccttcgaccaaaccagcaacacgatggattggtctctgtagaggctgttccagctgccatcgatctgtcgtcccgcaaggcgagtcatggaactgaagaacctcatgctgcctgcccttattttgtgttcaaattttcctttccagtatggaaaggaaattctaaggtgactggcgattaatctccctgtgatgaataataatgcgcgcccttgaactcaattaattgctgtgccgcatccatctatgtaactctccatgaatttttaagtatcagtgttaatgctgtattgtcgaggacttctgctcgatatgttatttctcttatgttgttcatcatgaatctttttctgcttattattctggtgccgggttgtcctt

SEQ ID NO: 267 - DNA, 2269 bp, Oryza Sativa
cgacagcaactgcatcacccaccttcctctcctctcctcccctccaactcccgatccccaaatctctcgcccccacccatggatcaccaccaccaccacctgccgccgccgccgccgcggtcgccgatggagaactccgcgtcctccaagccgcccaccccggcgtccaccccgtcgtcgcgcctcgccgccgcgccgtcctcccgcgtctcctccgcggcgccgcacccctccccgtcctcctccgcgcccacgccggcctcgcggacggtctacagcgaccgcttcatccccagccgcgccggatccaacctcgcgctcttcgacctcgccccgtcgccgtcccaccacgacgccgccgccgccgccgcctcccccggcgcgccgcccccctccggatctaccccggcctcgtcgccctactgcgcgctcctccgcgccgcgctcttcggccccaccacgcccgaccgggtggcgtcgtcggcgtccgcgtgctcctcctcctcctccgccggggcgtcgcccgtgggctcacccgccaccggcaacatattcaggttcaaggcggaggtgccccggaatgctaagcgcgcccttttctccgacggggacgacgagggcgtgctcttccccggggtgttcacgacgaggggcactggccccaggaagatccctaggtcaccttataaggtgctggatgctcccgcattgcaggatgacttctacctgaaccttgtggattggtcttcgcataatatccttgcagttggattggggaattgtgtctacttatggaatgcatgcagcagcaaggtcaccaagctatgtgatttgggggtggatgacaatgtctgttcagtgggttgggcacagcgtggcactcaccttgctgtagggacaaaccaaggcaaagttcaggtatgggatgccactcgttgtaagagaataagaaccatggaaagccatcggatgcgagtaggtgctcttgcatggaattcatcattgctttcgtcaggcagtcgtgacaagagcatccttcaccatgatatccgtgcccaggatgattatattagtagacttgctgggcataaatcggaggtctgtgggctcaagtggtcttatgataaccgtcagcttgcatctggtggtaatgacaacagactttatgtatggaatcaacactcggcgcacccggtactgaagtatactgagcatacagcagctgtcaaagctattgcgtggtcacctcatcttcatgggctgcttgcatctggtggaggaactgcagatagatgcatacgattttggaataccaccacgaatatgcacttaaattgcgtcgacacaggcagtcaggtctgtaatcttgtatggtcaaagaatgttaatgagcttgttagcactcatggatattctcaaaatcagataattgtttggcgatacccaacaatgtcaaagctcgccacattgacaggccatacatatagggtattatatttagccatctccccagatggacagactatagtaactggcgctggtgatgaaacgcttcggttttggaacgtgtttccatctcccaagtcccagagttctgacagcctaagtagcatcggggccacatcatttgttaggagctacatccggtgacactgagatgtggtaatctaataacacttggctcataagtcataacactactgcagcagagtgttgatgatcatcaatatcattccatttgtaccacttgcatcaccagttcatgaaccatcaaacctagccaaattttagagatagtaggatgcagaatggtgaaactggctcgcagacctcggagtggctcatttgctgaatgctgtatatatttattcattggctttgtaggagcgaagatggcaaacactgaccatccgcaatgtaccattgataagttcacggcctcctgtttttgtttttgctgagtcaacttggagctggagctcttatgtataccatgctagggcttaacaacattggccaactcatgatgctcattgcatccaagttggaatatgctaaggaagctggagaatttctggtgcaatgtcctattccagctggtgttgtttcttgcactgttgcacttctctgatagttctggtagactaggctcagaatcgagccagtcttgctactatgcgtctatgccaacgcggcaactttgtactgatctatgtcaactgttcatgcaagatttatgacgccaatgtattgagttgagttatcgtca

SEQ ID NO: 268 - DNA, 558 bp, Oryza Sativa
atgtcctccacgtgcatagccagcaatcaccgcattccacgccacagcatcccgctgtggcattccatcgaacaccttacgagcggcgcccatatccccagcttcagcatacatcccgatcagcgccgtcgcgacgaggaggtcggacgcgaaccctttcgcagcggcctccgccccgatacgccagccgacctcgaactccgacgcccgcgcgcacgccgccacggcgaggtggtacgtgtggcggtcgggaaggcacgccgccgccgccatctccccgaagatccccaccgccatccgcgggaggccacccgcgaggtacccgcggagcatggcattgtagaggagcgccttctgcggcgccgccgccgtcgccgcggcgtcgaacacattgcgggcggcgccggcgtccccgaggcggaagtagcgggagacgaggagggacgcgacgtagccgttggaggcgagccctgctacgacggcgagcgcgtgcggcctgcggtggtcggcggcggcgtggtggcgggcgaggtcgtggccggagatggcggcggctag

SEQ ID NO: 269 - DNA, 1224 bp, Oryza Sativa
atggacccgcgcgtgtggcgccggctgccgcagccgctggtggaccgcatcctggcgtgcctcccgacgccgtcgttcctccgcctccgcgccgcctgccgccgcttctaccacctcctcttctcctccccgttcctccactcccacctcctcctctcccctcacctccccttcttcgccttcgtcgtccccgccgccggccacctcctcctcctcgaccccaccgccaccgcctcctggtcccgcctcccgctcccgctcccgcccgtcgccggcggccccgccgcgttctcgcccgcggccgcgtccgccggcctgctcgcgttcctgtccgacgcgtcggggcacaagacgctgctgctcgccaacccgatcacccgcctcctcgccgcgctccccatctccccgaccccgcgcctctcccccaccgtcggcctcgccgccggcccgacctccatcatcgccgtcgtggccggggacgacctcgtgtcccccttcgccgtcaagaacatctccgccgacacgttcgtcgccgacgccgcctccgtcccgccctccggcttctgggctcccagctccctgctccctcgcctctcctccctcgatccccgcgccggcatggccttcgcctccggcaggttctactgcatgagctcgtcgccgtttgcggttctggtgttcgacgtggcggagaacgtatggagcaaggtgcagccgccgatgaggcggttcctgaggtcgccggcgctggtggagctcggcggcgggagggagggagcggcgagggtggcgctggtgtcggccgtcgagaagagccgtctcagcgtgccccgcagcgtgcgcctgtggacgctgcgcggcggcggcggcggcggcggcggtggcgcgtggacggaggtggcgcggatgccgccggaggtgcacgcgcagttcgccgcggcggagggcgggcgcgggttcgagtgcgcggcgcacggcgactacgtcgtgctcgcgccgcgcgggcccgtggcgcaggcgcccacgagcgcgctcgtgttcgactcccgccgcgacgagtggcggtgggcgccgccgtgcccgtacgtcgtcgtcgcgcaccacggcggcgccggcgcggcgggtttccgggtgttcgcgtacgagccccggctggcgacgccggccattggcctcctcgacgccacggcgcccgtcgccttgcatggcatgcatgatggttag

SEQ ID NO: 270 - DNA, 1493 bp, Oryza Sativa
cgaaacacaagaaacaaccggagaaaccgagcccggccgaccgcaaggacagcaagctagtagccatcctcgcatggatcccaacgatgccttctcggccgcgcacccgttccggtgggacctcggcccgccggcgccggcgcccgtgccaccaccgccgccaccaccgccgccgccgccgccggctaacgtgcccagggagctggaggagctggtggcagggtacggcgtgcggatgtcgacggtggcgcggatctcggagctcgggttcacggcgagcacgctcctggccatgacggagcgcgagctcgacgacatgatggccgcgctcgccgggctgttccgctgggacctgctcctcggcgagcggttcggcctccgcgccgcgctgcgagccgagcgcggccgcctgatgtcgctcggcggccgccaccatgggcaccagtccgggagcaccgtggacggcgcctcccaggaagtgttgtccgacgagcatgacatggcggggagcggcggcatgggcgacgacgacaacggcaggaggatggtgaccggcaagaagcaggcgaagaagggatccgcggcgaggaagggcaagaaggcgaggaggaagaaggtggacgacctaaggctggacatgcaggaggacgagatggactgctgcgacgaggacggcggcggcgggtcggagtcgacggagtcgtcggccggcggcggcggcggggagcggcagagggagcatcctttcgtggtgacggagcccggcgaggtggcgagggccaagaagaacgggctggactacctgttccatctgtacgagcagtgccgcctcttcctgctgcaggtgcaatccatggctaagctgcatggacacaagtccccaaccaaggtgacgaaccaggtgttccggtacgcgaagaaggtcggggcgagctacatcaacaagcccaagatgcggcactacgtgcactgctacgcgctgcactgcctggacgaggaggcgtcggacgcgctgcggcgcgcctacaaggcccgcggcgagaacgtgggggcgtggaggcaggcctgctacgcgccgctcgtcgacatctccgcgcgccacggattcgacatcgacgccgtcttcgccgcgcacccgcgcctcgccatctggtacgtgcccaccagactccgccagctctgccaccaggcgcggagcagccacgccgccgccgccgccgcgctcccgccgcccttgttctaagctcgccggagactctgctgctgttcccgcgccgccacggcgcgtgggagtttcctgtggtgttgggccgtgttttcgttgtaaggcagttaggtcgttctaagctattcgatgggccgatcgaggatgcgtcgtcgtgtaggaactcgtcgtgtacccatgtttgcgatctggatggcccatttgtttagctgttaccatgttaaattcgtttcctttatttatgaaatgctaaatcctaaatgtcgtg

SEQ ID NO: 271 - DNA, 4506 bp, Oryza Sativa
aatcgggtccaaaaaaaccaaaagcaaagaggaaaataaaagcgagaggagtttcggagagagaaagtgagaggaggaggaggagagagaagagaagagagataagaggaggagaaggcgaacgcggcggctaggtggagaggagaggaaggaagggagcaaacgaaggcggcggcggaaccctagccggaggcgggaggaggggggagacgcgaggtgtctctctggctggtcggattcggccggccgggaggcgtcagatcggtggtcgggccgccggagacggaggagatccggggcatgggcgtggcgacgggggcgggagggtcgtcgtgagctttctgccgccgtcggtttcggcttgagctctgggtttattaattttttttggggttgctgctgttttttttgtggaggtttgagttggtgaggggggtggtttggtgcgcccgtttgaggtggtttttgaggggatttgggagggggatctgccgcggaagcggggtttttagttcggctttgagagctggaggcgcaggctgggatcggcggagccatgtcgtcgcttagcagggagctggttttcctcatcctgcagttcctcgatgaggagaagttcaaggagacggtgcacaagttggagcaggagtcggccttctacttcaacatgaagcactttgaagacctggtgcagggaggggagtgggacgaggtggagaagtacctcagcgggttcaccaaggtggaggacaaccgctactccatgaaaatattcttcgagatccggaagcagaagtacctcgaagcccttgacaggcatgatcgagccaaggcggtggagatactcgtgaaggatctcaaggtgtttgcctcattcaatgaggagctgttcaaggagataacacagctgctgacgttggagaattttaggcaaaatgagcagctgtccaagtatggggacacaaagtcagctcggaatatcatgctcatggagctcaagaagcttattgaggcaaacccactgtttcgggacaagctgaatttcccaccatttaaagtttcaagactccgcacattaatcaatcaaagtcttaactggcaacatcagctatgcaagaatcccagaccaaaccctgacatcaagacactgtttaccgatcattcttgtgccgctcctaccaatggagcaagagctcctccccctgctaatgggcctcttgttggaccaatccctaagtcagctgcatttcctccaatgggtgctcatgcgccatttcaacctgtggtgtcaccatctccaaatgcaattgcgggttggatgacaaatgcgaacccctctttgccacatgctgcagtcgcacaaggaccacctggtcttgttcaacctccaaacacagcggcatttctaaaacatccaaggactccaacaagtgctcctgccattgattatcaatctgcggattctgaacatctgatgaaaagaatgcgtgtaggccaaccagatgaggtgtccttctctggtgcaagccaccctgccaacatttatactcaagatgaccttccaaaacaagttgttcgcaaccttaaccagggttcaaatgttatgagcctggatttccatcctgttcaacaaaccatccttctagttggaacaaatgttggtgacattgggatatgggaagttggctcacgagaaaggatagctcacaagacattcaaagtttgggatattagttcttgcaccttgcctttgcaggctgcactgatgaaagatgctgcaatatctgtcaatagatgcctgtggagtcctgatggaagtattttaggtgttgctttttcaaagcatattgttcagacgtatgcattcgtgctcaatggagaattgcggcagcaagcagagattgatgcccacattggtggggttaatgatattgccttctctcaccccaacaagaccctctcaattattacttgtggtgatgataaactaattaaggtatgggatgctcagacaggacaaaagcagtacacatttgaaggtcacgaagctccagtatattctgtttgccctcactacaaggagtcaattcagtttatattctctactgccatcgatgggaaaattaaggcatggttatatgactgtttgggctcaagggttgactatgatgctcctggacattggtgtactaccatggcttacagtgctgatggaacaaggctcttctcatgtggtactagcaaagatggtgattcacacttggttgagtggaatgagactgagggagctattaagaggacatacaatggtttcaggaagcgctcactgggtgttgtccagtttgatacaacaagaaaccgcttcttggctgctggagatgaattcgttgttaaattctgggatatggataacaccaacatacttacaacaacagattgtgacggtggactgcctgcgagcccacgcttgagattcaacagagaaggttcattgcttgctgttacagcaaatgaaaatggaataaaaatattagccaacactgatggacagcgtttgctaaggatgctagagagcagagcatatgagggctctcgagggccacctcaacaaattaataccaagcccccaattgtcaacacccttggttctgtttccaatgtgtctagtcctatggcagtgaattcggagagacctgatcgggcattgcccacagtgtcaatgagtggcctggcgcccatggatgttagcagaaccccagatgttaagccaagaattacagatgaatctgaaaaggttaaaacctggaagttggcagacattggtgactcaggacatctccgagcactgcgtatgccggatacatcagcaacttcaagcaaagttgtgcgtctgctgtatacaaataatggggttgcgcttttggctcttggctctaatgctgttcataagctgtggaaatggcaacgcactgataggaatcctaatggcaagtccactgcatctttcactcctcaaatgtggcaaccagcaaatgggattcttatggcaaatgacactagtgatggcaaccccgaagaagcaactgcctgcattgctctgtccaaaaatgattcctatgtgatgtctgcatccggtggcaaagtctcattgttcaacatgatgacattcaaggtcatgactactttcatggcacctccacctgctgcaactttccttgcattccaccctcaagacaataatatcattgctattggaatggaggactctaccattcaaatttataatgtccgtgttgacgaggttaaaagcaagcttaagggacattcaaaaaagatcactgggctggcattttcgcagtcaatgaatatgcttgtatcttcaggtgctgatgctcagctatgtgcttggagcattgatggttgggaaaagaagaaatcaagatatatccaatctccagcaaatcgttctggtgctttagttggtgatacaagggtgcagtttcacaatgaccaaacacatattttggtggttcatgagagccagttggcgatctatgatgcaaagctagagtgcttgcgctcgtggtccccaagagaagcactccctgctccaatttcaagtgcaatatactcatgtgatggtctcctcatctacgccggattttgtgatggtgcaattggagtcttcgaagcagagtctcttaggctgcgatgcaggatagcaccttctgcatacataccaccttccatgtctagtggtggaagtgtttaccccatggttgtcgctgcgcatcccttggagcctaaccagattgcggtcggcatgagcgatggtgctgttcatgtggtggagccgttggactcagacccaaagtggggagtggcgcctcctcaagacaatggaacccaccccacaatatcagcggctccggcagcagctaacaaaccagaagtctgaccatccctctagtgacttggccagcagtgccgacattcgttagacccaaagaatggtaggatcgtaggagatagggagaaagaagaaacagtttagatttgtgggatgaggtgaaatgtatcaagtccacagcatctccttttgcctgtggcagcagcacaggtgttgattgatgatgatgatgacatgtctaaattagtttttggttcttttttcccacccccagaaaatcttgacctcacctggcggctgccgcagtgtgtgccggagatggctgccatctttccctcctttgtaaagcttttctagctctgagctagtggtggttggtaccttagagaatgttcttttgttcctgcccttttttgcggggtaggaaggtattcctagtgtaaaatatggttggcatgttggatggtggtatttgtttggcctaatgcgactgattcaaccaattcttcggctcatgtcctatagatgtttgctaaccttgtaggccttgaaatcatttgatttggcgatggaactttggactcatgctgttccaa

SEQ ID NO: 272 - DNA, 1078 bp, Oryza Sativa
caggggctgaaacaaacccagcacatttgtgtttgtacgcgcagctagctagccacgagcgcggatccatctcctagctagcgcaccatctatggatccataccacgactaaaacatgcatgacccacgcggcttccccatccacccgcagccgtaccacctccaccccacggccggcggcctcggcgagggcaggatgcggggcggcgggcggcggcgccccggcgccaagctctccaccgacccgcagagcgtggcggcgcgggagcggcggcaccggatcagcgaccgcttccgcgtgctccgcagcctcgtgccgggcggcagcaagatggacacggtgtccatgctggagcaggccatccactacgtcaagttcctcaaggcgcaggtcaccctgcaccaggccgcgctcgtgcagcacgaggagggctgccagcacgccgacgtcgccgcggcgttctccgccgccgacgccgatctggcccttgagctgaaccatcgccacggcggcgccggcgatgatgacgccgggatgacgacgctggagatggcgccgatgcaagaggcggtgggctacggcgacggcccggctcatcagatgatgcagcaagcgctcgatccagcggggcagctgatgatgggcggcgctcatcagctgcctcctttgccttgctgtgtcttcgtccaggagactgacccctcgtgctactcggtgtgcaatgtccacggtgaggagtctggtgcgcaaggatcttattagctagctagtgagacagtggcttgcttaggtagttaatttccttaagtatgctcgaatattggctctacccactagctgtctagctctacttagcttacctaggtcgtcaaccaatatattaccggttggtcatggtcccttaaattagctagactcttgatttctgtaagaatgcatatatgcatgcatggggttctgttggagcaatgcataacagagctttgttttacatgcatgcgtgcatgcttcctagatatcattctgaaatctgaacttgtttgctcgatcgcttaattgctatctcaccatttcggt

SEQ ID NO: 273 - DNA, 975 bp, Oryza Sativa
atggcgcaggagcccatcaaccaccaccagcaccagcacgacccgcccaagcagcccccgccgcgggaggccgacgacgaccaccaccggattcaggagagggagccgctgccgccgccgacgacgacgacgcggaaccagcggctccagctgcagctgggcggagacggacaccacaaccaccaccaccaccaccaccaggaggtcgccgggacgagcggcagcagcagcggcgggagcagcagcaacaacggaggcggcggcaccagggactggctccgcctcgccaccggcccggcatcgccgggggcctccgccggctccgaccacgacctcttcccgtccaccaccacgacggcgcccgcgccgcagccgccgacgccgacgccgacgccgacgccgacgccgacgccgcgccaccaccaccacgacgtgctggtgctcccgggcatgccgccgccgggatccttcctccgccccggccccgccatgcccggcattccgcaggcgtcgatacccacgcacatgctgcgcgccgccccgccctggctgccaccgtggagccccgtggccgcgccgccgccgctcctcccgttcccccaccaacaccgcgcgttctacgccgcgccgccgacgacgacgccgcccgcctcctcgggcttcgacgcgatcagggtcgtcctcccgccgtccgccgtcgccgccgccgccggcgtctggttcgtgctccaggccgcgccgctccaagggagggagccattcttgcctcagattccaaggagctacctacggatcaaggatgggagggtgacagtaaggttgctgaccaagtacctggttaacaagcttggattggaagatgaatcagaggtgaggggtgtgtgtcttgggtggcacatcagccccccctcaccacttgacaagagcttctccatccatgccattccattccattccattccatccatcctctag

SEQ ID NO: 274 - DNA, 1038 bp, Oryza Sativa
gtggattgcagaagatgatgctgcagtgatcccgtccactagctggtgaattggagagacggatggagctcgagctcggcctcaggctcgcgctgccgtcgccgtcgccgtcgccggcgacggcgacggcggctgggagtgagcttgaccttctcaacagcgcgccggggtcctgccgcaagaggggcttcgaggaggcgctcggtgggttcaaaaccgacgacgacaacgacgacggcaatggccgcggcggtgacggcgattccgacggcgaaatgggcaacaagaggaggaagctggtggggtggccaccggtgaagtgcttgcaccggcggcgcgacggtggctgcggtggcggatatgtgaaggtgaagatggaggggttggccatcgggaggaagctggacttgtccatcctcggctcatacgctgagctgctcgacacgctccaccttatgttcccctccactaaccaagaggatgggcacgatcgtcgtcgacgtcacccatacgctgtcacctacgaggatggggaaggagactggatgcaggtcggagacgtgccatgggaggcctttgccaagtcggtgaaacggctcaagatactggtgtaactgactgcaaattaagctactagtactagtctttactacttcgaataaaattgtacgtgaacgggattattttgttcacgtttctctcatcataaatgtgtagtgtttcagcaatttcataagcatgacgaatgaaatctcgtagctgttgtcatcaatcaccttgcatttcgtgtcaaactacatctgtggccagcgcacagtagtgttagtatagtgtacaccgtagagtcacctcgctgtgatcagcacgtgcatgcatctgtataatacaccgccacatatgcacaggatggtactgaatactgagcatatcctgtacggggagttcagatatgggtgttatggcctaccaaagtgaatcttatcacatttttttaatcattaacgtgtggtatccaatatattgaatgaaatttttatc

SEQ ID NO: 275 - DNA, 865 bp, Brassica napus
acaagaacgaagaataaaaaattaaatcagaaaccacctgtttgttttagatcaaagatgtctttaagtaatagagatcctcttgtggtagggagagttgtaggagacgttcttgaatgtttcacaagatcaatcgatctaagggttacttatggccaaagagaggtgacaaatgggttggatctaaggccttctcaagttctcaacaagccaagagttgagattggtggagaagacctaaggaacttctacactttggttatggtggatccagatgttccaagtcctagcaatcctcacctccgagaatatcttcactggttggtgactgatatcccagcgacaactggaacaaactttggcaatgagattgtatcttacgagagtccaaggcccaactcgggtattcatcgtatcgtgctggtattgttccgacagctcggtaggcaaacagtgtatgaaccaggatggcgccaacagttcaacactcgtgagtttgcttccctatacaatctcggccttcccgtggctgcggttttctacaattgtcagagggagagtggctgcggaggacgaagaagttagatgagcctcttcttcttttaataacttgatattgcacactcataatgagatttatgcatctatagtcttataagaagccttttacgatacgagcaatgaacggtgataataaatatagtagttttatatgtattaaataaatccgagggggggagtgtttttatttatatggtgtgtgatgcaatatttatatcattctacatgaaataaaagtgttatatatagcatgttacgtatgtattattcattttgatgcaaacagtatcttaacattcggaaa

SEQ ID NO: 276 - DNA, 609 bp, Brassica napus
atgtctttaagtccgagagatcctcttgtgcttgcaagagttgtgggtgatgttgttgatcctttcatgagattgatctctcttacggttaattatggccaaagacaggttactaatggtttggatctaaggacttctcaagttctgaataaaccaacggtcgagatcggaggagatgacctcagaaatttctacactttgttacgtgatgtttttagagtgtcttgcatgcataactgctttggggttttggtgatttttccggaaattttcttgattatcatgttatggtgtccagatgtgccaagtccaagcaaccctcacctccgagaatatctccattggttggtgactgatatacctgccacaactggaaccgcttttggcaatgaattggtgcactatgagaacccatgtcccaattcaggaattcaccgagtagcactgatgttgtcccggcaactcagaagacaaacggtttatgcacctgagtggcgccaacgcttcaacactcgtgcgttcgctgagaacaacaatcttggtctacccgtggctgccgttttcttcaactgtcagagagacaatggctgcggaggaagaagaacatag

SEQ ID NO: 277 - DNA, 3211 bp, Brassica napus
agattaaaaaaaaaacaaaaaacaataatcagtcgacttgaaattgattctccggcgaactctccgaacctccgtgtaatccctgagaacgagtcattatcgatttagggtttaggtgttatggagagccaggactcggacgagccgatgcagaagaagcctcatcttctggactccgtctctccgaccgccacggcccctaactcttcgccgtctcatcccgtcgctaaaagtgttgatgccacggttctacagttacagaatcagaagcttgtgcagcagttagacctgcagaagaaacgtatgtacgatgttgagactaagattcatgagttgcatctcaatcaaagctcttatgatgaccagcttatctctgttaaccggctctggaaccagttggtagatgatctggtcttgcttggagttcgagctggagccaatcaagaagctctcaaatacttggacattgcagataaaaagcgaggttcagttccgccttgtgctgctgacgaaatgtttctatgtagacttcttgaagtagattccataggttctagtaatagtgatgaggtagtgagaaaggttgaagaagctctttctctgcgtcattcctctacagtggagttgatgggagtctttgaaaacaccattgctactcagaggactaaagctgaaagcatatcacagaatttacaggctgtgaaatctgcagaagacgccactgttcagttgtctaacattaacgatttaatgaaagaggaggccagaaacttgcgtgagatgattgacgctttaaatgcgaggcacaaagaacagactgagcagattcaagcgtatgtatgcagccattcaacagatcaatccgagcttaaacacctcaaaggtgaactggaagagatcaaggctgagcttgaagagaatagacgaaaattgataaacctgaaaatgcaaaaggatgctgcatgtgaaggtcatgtaacatcatcaccagcagtagctaatggaagcgtttctcctgagaagcctgtagataaaacgaagttgcgtgaattgaaggactcaattgatgaaataaagatagtggcagaaggtcgtctctctgagctccaagctgcacaagagtataatctttccttgtcaagacagtgtgaagatattgagaatgaactaaaggatgaccagtatatatactcgtctagactgtataacttgatcaaagagcaacttcatcactggaacgatgatgtggatcggtataaacttttatccgaggccgctcaggctgaaaggtcctttgtaatgagacgagagaaggacctaaatcaaagggaagaatccctggaggcagctaaacagaagattactagtgttggttctcgaattgaagtgctggaacagaagctgcagagttgtatagttgaaaagaatggattggagctagaaacagaagaagctattcaagactctgagcggcaagatattaaaagggagtttattacaatggcatcaacgttgtctaaagagatggaaatgatggaagcgcagttgaaacggtggaagaacaccgcacatgatgctcttgacctgcgtcaacaagctcagtcgctgagagtttcgttaagtaacaaggcagacgaacagaagggtttagagaataaatgtgctgaacagatggcggaaattaaatctctcaaggctctaattgaaaaactgctaaaagagaaattagagttgcaaaatctagcgagcatctatactcgtgagtgtaatgatgaaagaggattagcagaaatcaaggaatcacaacggaaagctcaggcgcaggctgaggagctgaaaaatgttttagatgaacactttcttgaattgagagtgaaagcggctaatgaaactgaaactgcttgccaagaacggcttgctaccgcaaaggctgaaattgctgaactgaggactcagttagatgtttctgagagggaggttttggaacttaaggaaggtatcaaagtcaaagagcaggaggccgaggctttgattgctgaaatggagactgttggtcaagcctatgaagacatgcaaacacagaaccaacatttgttgcagcaggtggctgaacgggatgattataatatcaagcttgtttccgagagtgtcaagacaaagcatgcttacaacactcacttatctgagaagcaagtaatggaaaagcagctgcaaaatgttaatgcatcagtagagactctaaaagcaaggattgcacatagtgaggaacagatgaaaggctgtttcgctgaggcttataaactgattcaagaagatcgtcacctcgttctcagtctcgaaaccgccaagggggaattagctgatgctgaaaaggagttcaggtggatcaaatcggctgtttcttcatccgagaaggaatatgaacagatcagcaggaggacagacgaaatcaaactggaattggatgatgagaggagtgagaagaaaaagcttgaggaagagctgatggagttgaacaaggagcttgaagagttgggttctgagagtgtagaagctgcaacactcagactccaggaagaagttaagaattgcaaaaacatcctcaagtgtggcgtttgttttgatcggcctaaagaggtggtaattatgaaatgttttcatctcttctgcaagcaatgcatccaacgaagcttggagatccgacaccggaaatgtccaggttgtggtacggcgtttggccagagtgacgtccgggttgtcaaaatgtaaaacacacacacatggtgttagtacataacacacttaactactttaaggtccacaatctcatcttttacctgccactcttcaataatatattgtatgggaaatggtggcctcttctgtggatgtgttggttaagatataaccaccaaatctctgtgtttccagctaagtcggtgatgagaagttaggtgtggcatctttatggagagagtgtagtttttaagtattttgacagtagtgtgtttttttttgtgttgcctccatttatgccttcgtttaatgacatggggaccgacaaagacatcacaaataggccagagcagtaagataatattgcatctttgcaatttgcagtgaaacttctcatgctttgttgtggaattgtttgattcccagttatagcttgcggcttgtgaatgagtagtctgtatttttcctaagatct

SEQ ID NO: 278 - DNA, 3107 bp, Brassica napus
atgctccacgtcagcaatccctgcgaatacgtgatgtggaaatatccgatcagacgtgggtcttatcggacgttcgggacctctagttttatccacgtcagatatttcaattttcatttcttttttttttttggttccgcgacaaaactttctaatatctatccatctccgggaaaaaaaaaactccgtggcttatggtcgtctccgataaccactctctgggagataaatcaaattggctcactctctttgtgtaatttgttctttctgtaagcagagagaagctcagattctctttgtgtatttgctttccttttttaattattgattccatgtttctctttcccaatcgttagctgcttgtggtggatccgtattgctgatttgcaaaggtagaactcgattcttcgctggagaatttgattactgtaagatttggaattcagatgattttgtttgatgtgattaggtcgagaatcgagattcagtttttaggttttgatgattttgcagtaatcaaatctttgtttagttagctttttgcgtttatcaaaattagggattcaggtttgttcttagagtggtgaggagaagcgttttaatattttgatctcattttgaaacacagggaagcagagctggtgtgatgaatgttaatgaggagggtgagggttcgcgttacccagtcactgatcagaagcccgttgagacgaaagagaggcttagtggagaagataaagctaatggaatcgttatggatgtgagaaacgggagtgcagtgggctcaggtggactgcaaattccaatttcgcagcaaacaccggccactgtttgttgggaaaggtttcttcatgtgagaaccataagagtgttgctggtggagaatgatgactgtactcgttatatcgttaccgcgcttcttcgtaattgtagctatgaagttgttgaggtagctaatggtgtacaagcttggaaggtgttggaagatctaaacaatcatattgatattgtgttgacggaggtagtcatgccttacttatctggtattggcctcttatgcaagattctgaatcacaaatcccgtcggaacatccctgtcattatgatgtcatctcatgactcaatggggctggtctttaagtgcttatcaaaaggagcagttgactttctcgttaagcccataagaaaaaacgagcttaaaatcctttggcaacatgtttggagaagatgtcagagttctagcggcagtggaagtgaaagcggaactcatcaaactcaaaagtctgtgaaatcaaagaatgttataaaatctgacaacgattcaggacgcagtggtgagaatgaaaatgagagcgatggcctgaatgctagtgatggaagtagtgatggcagtggtgctcagagctcttggacgaaaaaagctgtggaggttgatgatgacagtccacgagcggtatctccatgggatcgagttgatagcacttgcgcacaagtggtacattccaaccccgaggttcccggtaatcacttgatcgcagcacctgctgagaaggagactcaagagcaagatgaaaaatttgaagatatcacaatgggtagagacttggagattagtattcatggaaattgtgatctgacactggagccaaaagatgaacccttaaccaaaagcactggcgttggaaaaggacctttggacctcaatagtgaaagccgttcaagtaaacaaatgcatgaagatggaggctcaggcttcaaagctatttctagccaccttcaagataacagagagcatgaggcgcctaacacacactgtaaaactgtagacaccaatgaagctgccattaaaaaccccgaagagccaatgcacgttgaacatagttcaaagaggcatagaggagctaaagatgatgagacgatagttagagatgaccgcaatgtgctgaggcgttcagagggttcagctttctcaaggtataatccagccttaaacaacagtaagctttctggcgggaacttgggaagcaattctcgtcatgataataattgccaagatcttaacaaaaggactgaagcggcatgtgattgtcactcaaacatgaacgagagtctccctagcaatcatcactcccgcgtcggtagcaataacgtggaaatgagttccacaactgtgaacaacgctttcacaaagccgggagctccgaaagtaagcccggcaggatcttcatcagcaaagcgttcattgtttcagcctctaccgtgtgatcatcatcactcctctcataatcttgttcacgttcctgagcggaagttaccaccacaatatggatcgtcaaatgtatacaatgagacggttgaaggtaacaacaacaacactgtgaattacagtgtgaatggaagcgggtctggtagtggtcatggaagcaatgacccatatggaagcagtaatggcatgaatgctggaggattgaacatgggaagtgaaaatggtgctggcaaaagcgggagtggtgatggtagtggaagtggaagtggaagtgggaatgtggcagatgagaataagatctctcaaagagaagctgctttgacaaagttccgtcagaagagaaaggagaggtgcttcagaaagaaggtgcgataccaaagccggaaaaaactagcggaacaacgacctcgtgtccgtggccagttcgtccgaaaaacagctgctgcaacggatgataacgacataaaaacgccgagggatagctaacggggaaaactgctaaaacaacacttgtcagcaggaagaaagaaaaaacttgtaaggttctcatcatccatgttgggatctatctatcagtctatatatcacttctttttaacaatttttctttaccctcaaaagtgtgattctttgatactactacactagtattccacgaacacacacgacagacaaattgattgtttgttattttgtcgtcgtatagtgtggtttgtggattcaggacaggatttggttcatgagttgagggtgtggttgtagatgttgtaaacttctgtaaaacaataacccactgtttgtttgtataagctatattggttttggagcatatatattgtag

SEQ ID NO: 279 - DNA, 835 bp, Brassica napus
atggcggattccgacaacgattcaggcggccacaaggacggaggcagcgcatcgtcgcgtgagcaggataggtttctcccgatcgcgaacgtgagtcggatcatgaagaaagcgttgccggcgaacgccaaaatctccaaggacgcgaaggagacggtgcaggagtgcgtatccgagttcataagcttcgtcaccggagaggcatccgacaagtgtcagagagagaagaggaagacgatcaacggcgacgatcttctatgggcgatgacgacgctagggttcgaggattacgtggagccgttgaaggtttacctgcagaagtacagggaggtggaaggggagaggacgaccacggggaaacaggtggataaggaaggtggagctggaggaaatgggaactctagtggcggcggaggaggaggatacaatggtggaggacgtgcgacggcgggaggagggatgtacggtgggattgtgacgatggggaatcatcatcaaggacacgtgtacggtggagggatgcatcacacgcagcaaagcgggtccgcacgtgctgattagttaagctctgactccgttaattcgcacgtggtgattaattaagcttagactgcgttaactcgaaatggctttctaagcttagtaaatgttttatctctctccttgctctacttcttatgtgaaatgtaaatgtcttgtatctttctccttgctcaattcttgtgaatgtttttttaaccaaaggaacttcccaaagagacagtaactaatccaaaaccaaaagatgtaacaaagtcaagaaactaagattgtgagagactgccattgctttgtt

SEQ ID NO: 280 - DNA, 847 bp, Oryza Sativa
tgcaccacacacagttcagctagcagatcacctagctagatagctgcctctatcacagtatatttgctccctgcaacttgctgctgctgcaatagctagcagctgcagctagtaagcaaaactataaaccttcagggttttttgcaagatcgatggccggaagtggcagggacagggaccctcttgtggttggtagggttgtgggtgatgtgctggacgcgttcgtccggagcaccaacctcaaggtcacctatggctccaagaccgtgtccaatggctgcgagctcaagccgtccatggtcacccaccagcctagggtcgaggtcggcggcaatgacatgaggacattctacacccttgtgatggtagacccagatgcaccaagcccaagtgaccctaaccttagggagtatctacattggttggtcactgatattcctggtactactgcagcgtcatttgggcaagaggtgatgtgctacgagagcccaaggccaaccatggggatccaccggctggtgttcgtgctgttccagcagctggggcgtcagacagtgtacgcgcccgggtggcgtcagaacttcaacaccaaggacttcgccgagctctacaacctcggctcgccggtcgccgccgtctacttcaactgccagcgcgaggcaggctccggcggcaggagggtctacccctagctaacgatgatcccgatcgatctgctgcatgctcactatcatcatccagcatgctatacattgcaggttcagacaattgaaatgattctcgacacacaacatatatatgatggtgtaattaattatgcaattaaatagctgagcaaggctaaggt

SEQ ID NO: 281 - DNA, 866 bp, Oryza Sativa
cctgtcactgtttggctagcttaaccttcctgacatctatcctctggattgaacggcaggagatacctaagctagctagcaatctctatcgatctgtttgtttacatgttcagttaaaggttactgagaaatgcctagagtttttccggctagcttcataagttagtgggttagctgacctagattcaaagtctaatccttttatttatttgatattagatatcctaacgtttttagttagaggttattaatttgacatggccggcagcggcagggacgatcctcttgtggttggcaggattgtgggtgatgtgctggatccattcgtccggatcactaacctcagtgtcagctatggtgcaaggatcgtctccaatggctgcgagctcaagccgtccatggtgacccaacagcccagggtcgtggtcggtggcaatgacatgaggacgttctacacactcgtgatggtagacccggatgctccgagcccaagcaaccctaaccttagggagtatctacactggctggtcaccgatattcctggtaccactggagcaacatttgggcaagaggtgatgtgctacgagagcccaaggccaaccatggggatccaccggctggtgttcgtgctgttccagcagctggggcgtcagacggtgtacgcaccggggtggcgccagaacttcagcaccaggaacttcgccgagctctacaacctcggctcgccggtcgccaccgtctacttcaactgccagcgcgaggccggctccggcggcaggagggtctacccctagctagctacgcatgccacccggcctccatgcatgcagcagctatagctaagctgagacctgcctagctgtata

SEQ ID NO: 282 - DNA, 2997 bp, Oryza Sativa
gtcttccaccttgagtcgcgtaaaagaaaaagaaaaatctcccgtctcgttctcgtcgtctcctccgctccgctcgttgcgccgccgccaagacgagcaggggagggccgggcggcgatctccatccggcgagcagcggaggggaggggatcctgatggatgccgcagctcttcagtatgagaaccagaagctggtgcagcaattggaggcacagaagtccaaaatgcgtgcattggaaggcaagttcaaggagctgagggatgagcaatgttcttacgacaatacattgatttgtttgaataaaatgtggaatcagctgattgatgatttagtgctgcttggggttcgagctggtggggatttaaacggtttgcaagcgcttgatcatgaagagatgtcagaagaatctcttgagtcatgtccttctgaggagatatttctcttcagactcttgaattccaggaatttcagaaataatgatgacagtagcctgtcaaaattagttgaggaagctcttgccttgcgctattcaacaacagttactctgatgaagtccctgcaagaggcttttgctgtacagcaggctagaagtgaatctttatcattagctttaaatggacagaactccagtgaagacgttattgtggcccttgaaaaccataatgattacttgaaagaagtggttgacaatttacgtcaagctgtgtctatcatcaacaggaagcacgaaaagtatctggatgagattgaggctttcaaaaacaatcaatcaagagaactacatgaagtaaagtgtctttcaggtgagctagaggaaagcatggcagagcttgaggaaagccgtcgaaagttggctgttctccagttgcaaacgggtggaggctcactgatgaacacatctgctcctaacggtgtgaacggtagtgtttcaactgataaatcttcagacaagggtatgggctggcgagatctgaaagatgctgttgaggaggctaagactcttgctgcaaaccgcctatttgaactccatgagactcaagaggataatctgatactatccaagcagttggaagatattcaggatcaattaaaagatgagaactatattgttacatcaaaaccatatacgattctcagtgaccagttacaccatctgaatgctgagatagagcgatacagggggttagttgaagtgctacagaatgaaaaggaccagctcatgcaaaaggaagaagaaatgcttgcaaaggcagaatcagtggacgctgttcaacaatccattaccacttacaaggccaaaattgaggacctggaacatgaaatccagaaacttatggctgaaaagaatgatcttgagatcaaggctgaggaagccttgcaagattcagggaaaaaagacttcaaggacgagattcatgttatggctgcatcactctccaaagagatggaattgttggacaatcaaatgaatagatccaaggatgcggcttctgaagcacttgcactacgtgaggaagctgactatttaagaactttgctagctaagaagattgatgaacaaaaggagatatctgatagatacaacacacaagtcaccgagatcaaatccctcaaagcattgattgagacactggaccaggaaaagcaggagttacaatttatagtggatatgctcggtaaagaatgttctgagtcgagggcaatttcagagattgaagaatcagaaaaccgagctcgcaagcaagctgaatatttgagaaaatgtttagaagagcataatcttgaacttcgagtaaaagcagcaaatgaagcggaaactgcatgccaacaaaggctttcaattgctgaagcagaactggaagacttaagggccaaagtggatgcatcggaaagagatgttatgaaactcaaggagtcaataagaattaaagaagctgaagtagatggccatatttctgaaattgagacaattggtcaagcatatgaagacatgcaaacccaaaatcagcaccttcttcaacaggttgctgatagagatgattttaacataaagctagtatcagatagtgtaaagatgaagcaagcctatggttcccttcttgctgaaaagaatatgctacagaagcaacttcagcatgtcaacagttcactggagtcatctaaactaaaaatcaccagtggtgaagagcagatgaagacctatgtagcacaagctatgaaatcttcttcagagaataggcatcttgcaattagccttgaaaggactatgctggaggtatcagatgcagagaaggagctcaagtggcttcggtccgctactggatctgctgagaaagaatatgagataaatcagaaaaaaatagctgagctaaaaatggagctagagcgtgagagaaatgagaggataaagcttgaggaagaatacgaagaggtgaaaaacgaagtcagtgagctaacctcagaaactgaagagactactatacagaagctccaagatgaaataaaagaatgcaaggctattctcaagtgtggggtgtgcttcgaccggccgaaagaggtcgtgatcaccaaatgcttccacttattctgctcgccatgtatccagaggaaccttgagatccgccaccgcaaatgcccaggttgtggcaccccctttggacagagtgacgttcgggaggtgaagatctgaagcgtcagcaaaacagcttgaatgactgacttggtagcgagcatgtaaatatatagtagtagtgctagtttctgttttcttggaggacagatattagatcgaattgtcttggtgtgcctctgccaagactgccatgtagaaactattattattatcacctaaaaatagtgcaattgcggggatctgatactgactgtgtctgttttgcgtgttgtatcattaatttatctgttaattgaggtaccggctaaagttgttttacaatttacccgggaaataatgcattttgagtttatttattgatcca

SEQ ID NO: 283 - DNA, 864 bp, Oryza Sativa
atggggatggccaatgaggagtcgccaaattatcaggtgaaaaaaggcggccggattcctccacctcgatcgagtttgatttatccgttcatgtcgatgggaccagcagccggagaaggatgtggcctgtgcggcgccgacggtggcggctgttgctcccgccatcgccacgatgatgatggattccccttcgtcttcccgccgagtgcgtgccaggggatcggcgccccggcgccaccggtgcacgagttccagttcttcggcaacgacggcggcggcgacgacggcgagagcgtggcctggctgttcgatgactacccgccgccgtcgcccgttgctgccgccgccgggatgcatcatcggcagccgccgtacgacggcgtcgtggcgccgccgtcgctgttcaggaggaacaccggcgccggcgggctcacgttcgacgtctccctcggcgaacggcccgacctggacgccgggctcggcctcggcggcggcggcggccggcacgccgaggccgcggccagcgccaccatcatgtcatattgtgggagcacgttcactgacgcagcgagctcgatgcccaaggagatggtggccgccatggccgatgatggggagagcttgaacccaaacacggtggttggcgcaatggtggagagggaggccaagctgatgaggtacaaggagaagaggaagaagaggtgctacgagaagcaaatccggtacgcgtccagaaaagcctatgccgagatgaggccccgagtgagaggtcgcttcgccaaagaacctgatcaggaagctgtcgcaccgccatccacctatgtcgatcctagtaggcttgagcttggacaatggttcagatag

SEQ ID NO: 284 - DNA, 3319 bp, Oryza Sativa
agtagcagtagcagcggagggagcggcacacgatacgcgccgcgcggatcccctcccttccctcctcttcttcctccgccttcgccgccgccgccgccgccgccgattactcgcttccgcctccgcctcaaccccgttcgtccccaaccaaccaaccgcagtccaatccaagcgaatactaagctcacttgaattcggttggtgcctcgtcgtcattctgccaccacttgagagttccttcatacacacaccactcgcagtctcagcagcagcagcagcagcgcagtccgtagcaaagctgctgttatcttcctacatgcggatgcagcccagctagctaagctaggttagctgctgctgttggtcttggaggcaaactagtgtaatatgtgccgtaccgcctgcctttcttcatcaaccaaacccctgccaccactcaacccggccaacctcttcgagtcaggctgatgatgggaaccgctcatcacaaccaaaccgccggctctgccctcggagtcggagtcggagatgccaacgacgccgtgcctggggctgggggtgggggctacagcgacccggatggcggaccaatctccggtgtgcagcggccaccgcaggtctgctgggagcgcttcatccagaagaagactatcaaagtcttgctagttgatagcgatgactccaccaggcaggtggtcagtgccctgcttcgtcactgcatgtatgaagtcatccctgctgaaaatggccagcaagcatggacatatctagaagatatgcaaaacagcattgatcttgttttgacagaggttgttatgcctggtgtatctggaatttctctattgagtaggatcatgaaccacaatatttgcaagaatattccagtgattatgatgtcttcaaatgatgctatgggtacagtttttaagtgtttgtcaaagggcgctgttgacttcttagtcaagcccatacgtaagaatgaacttaagaacctatggcagcatgtgtggagacggtgccacagctccagtggcagtggaagtgaaagtggcattcagacacaaaagtgtgccaaatcaaaaagtggggatgaatccaataataacaatggcagcaatgacgatgatgacgacgatggtgtaatcatgggacttaatgcaagagatggcagtgataacggcagtggcactcaagcgcagagctcatggacaaagcgcgctgttgagattgacagtccacaggctatgtctccagatcaattagctgatccacctgatagcacttgtgcacaagtgatccacctgaagtcagatatatgcagcaatagatggttaccatgtacaagcaacaaaaattccaagaaacaaaaagaaactaatgatgacttcaaggggaaggacttggaaataggttctcctagaaatttaaacacagcttatcaatcctctccgaatgagagatccatcaaaccaacagatagacggaatgaatatccactgcaaaacaattcaaaggaggcagcgatggaaaatctggaggagtcaagtgttcgagctgctgacttaattggttcgatggccaaaaacatggatgcacaacaggcagcaagagccgcaaatgcccctaattgctcctccaaagtgccagaagggaaagataagaaccgtgataatattatgccatcacttgaattaagtttgaaaaggtcaagatcgactggggatggtgcaaacgcaatccaagaggaacaacggaatgttttgagacgatcagatctctcggcatttacgaggtaccatacacctgtggcttccaatcaaggtgggacaggattcatgggaagctgttcgctgcatgataatagctcagaggctatgaaaacggattctgcttacaacatgaagtcaaactcagatgctgcaccaataaaacaaggttctaatggtagtagcaataacaatgacatgggttccactacaaagaacgttgtgacaaagcctagtacaaataaggagagagtaatgtcaccctcagctgttaaggctaatggacacacatcagcatttcatcctgcacagcactggacgtctccagctaatacaacaggaaaagaaaagactgatgaagtggctaacaatgcagcaaagagggctcagcctggtgaagtacagagcaacctcgtacaacaccctcgcccaatacttcattatgttcatttcgatgtgtcacgtgagaatggtggatccggggcccctcaatgtggttcatccaatgtatttgatcctcctgtcgaaggtcatgctgccaactatggtgtcaatggaagcaactcaggcagtaacaatggaagcaatgggcagaatgggagtacgactgctgtaaatgctgaacggccaaatatggagatcgctaatggcaccatcaacaaaagtggacctggaggtggcaatggaagtggaagcggcagtggcaatgacatgtatctgaaacgcttcactcaacgagagcatagagtggctgcagtgatcaagtttagacagaaaaggaaagagcgcaacttcggaaaaaaggtgcggtaccagagcagaaagaggctggccgagcagcggccaagggtccgcggacagttcgtgcggcaagctgtgcaagaccaacaacagcagggtggtgggcgcgaagcggcagcggacagatgacctacctacctacctacgcgatggctttggactccaaacagctaattaacagttagtagacaacagataatgattcttcttccttggccgatcgatcaacaacatcccatgcatccggcatcccaccaccattgattccatcatatttagagtctggaataaataaggaactcctatcctatttatcccctatctatatatgaagatatgataatggtgatctgcgttactactagtagaagaatatggtgtggctgactccacttcaggtggacctataatactactccagtagtatgtgcctgtggagtcaagctcgaacgtactactccatatttaagcatgtcatgtactgctactatgagacgagagtgctctgccctgtagggacagcactattgtcaatgtcatgtgtttgttgggtcactggtcttcttagatttgcgtccatgtctggcagcagcactccactgtagttggctcacgcatgttgttgaaatgagccacatgccttgccttgagatagaacttgctgtcactgtttctccttaatctaaatatactggagtggagtattttattatctatgatctgtaatcaggtgattgacaaggctcgtcaaa

SEQ ID NO: 285 - DNA, 1718 bp, Oryza Sativa
tctcaattctcataaaataaatcaatcccttgcctagactccaataacaaaagaaaatgtaatacttccttcggtcattagtatatgttagtataaattaaataattaaacaccttaaacaatattttttcgtcgtagtttgatcatcacctaagattttttagtcttttcaaaatgatcatcagctaacaagtgtatctttatttatttgtgcaagaagtaaatgagcatcattgaatgcgctgcacacatgtaatgcaaacaaccaagttaatttttattggtgcaacggcgcgcactatttaaaacgtgacgcaatgcagcgatagagcaccttgatagataagaattaatttcagcatgatgtagattttgttatccttaatctctactcactttgcataggtaataaattaaaccgctgaactattactacatggtttacatgaaaggtgatcgggtagggacgagaatgtcgcgacacacataatatatatagtagcgtccttatgtttgctttgtgtccgcatcgataccgtcttcccactcgcatctcctcacctcctttccttctttaaaaggagagcatcaccactccatcctcaactcccataacctcccccttctctctctctctaactacacactctctctctagctagctagctagctatagctagtgttgttagcttcacatgaagagtaggaagagctatgggcacttgctgagcccggtgggcagcccgccgttggacaacgagtccggcgaggcggcggcggcggctgcggctggcggcggcggctgcgggagcagcgccgggtatgtcgtctacggcggcggcggcggtggggactcgccggcgaaggagcaggacaggttcctgccgatcgcgaacgtgagccgcatcatgaagcggtcgctgccggcgaacgccaagatctccaaggagtcgaaggagacggtgcaggagtgcgtgtcggagttcatcagcttcgttacaggcgaggcctccgacaagtgccagcgcgagaagcggaagaccatcaacggcgacgacctcctctgggccatgaccacgctggggttcgaggcctacgtcggcccgctcaagtcctacctcaaccgctaccgcgaggccgagggcgagaaggccgacgtgctcggcggcgccggcggcgccgccgcggcgcgccacggcgagggcggttgctgcggcggcggcggcggcggcgccgatggcgtcgtcatcgacgggcattacccgctcgccggcggcctgtcacactcacaccatggtcatcagcagcaggacggcggcggcgacgtcgggctcatgatgggcggcggcgacgccggcgtcgggtacaacgccggggccgggtcgacgacgacggcgttctacgcgccggcggcgacggcggcgtcagggaacaaggcgtactgcggcggcgacgggtcgagggtgatggagttcgagggcatcggcggcgaggaggagagcggaggcggcggcggcggcggcgagagggggttcgccggccacctccatggcgtgcaatggtttagactaaagaggaatactaattagctagctaggcacacgcgtagttttattattacttaattaccgcgttaattaattgttgatgctgatgctgtttaaaattgattctccttttgcatgaaatgtttgatggtatggtttaaaattgaagaa

SEQ ID NO: 286 - DNA, 1770 bp, Brassica napus
atggacgatcatcatcctcagtacggtgtaccggagctccggcagctcatgcaagggaggacgactacgacggaatcaccgtcgacttcttctcattttccctctgatttctttggcttcaacctagctccggctgcgccccctccgccgccgcaacaccaccggctacatcagttcactacagatcaggagatgggtttcttaccacgtggcatacatggactgggtgggagttcttcgacggctggaaataacagtaacttaaacgctagcagcagcggtggagcagttgggtttagcgggtttctcgacggaggaggtatcggcggcggcggaggaggagatggtggaggaacggggagatggccgagacaagaaaccctaactctgctggagattagatctcgtcttgatcataagttcaaagaagctaatcaaaagggacctctatgggatgaagtttctaggattatgtctgaggaacatggataccaaaggagtgggaagaaatgcagagagaagtttgagaacctttacaaatactataagaagactagagaaggcaaggccggaagacaagacggtaaacactatagatttttccggcagctcgaggcgctctacggtgattccaacaacttggttccttgtcccagtcataacacacagttcatgagcaatgctcttcatggtttccacactcaaaacgccatgaacgacgttactacaacaacgtctaacattcataacgttgatagtgttcatggttttcatcgtcaaagcctaagcctttctaacaactacaattcctccgagctggagttggtgacttcgtcttctgaggggaatgattctagtagtagaaggaaaaagaggagttggaaaaataagatcaaggagttcattgatgtgaacatgaaaaggttgatggagaggcaagatgtttggcttgagaagttgacaaaggttattgaagacaaagaggaacaaaggatgatgaaagaagaggaatggagaaagagtgaggctgcgaggatcgataaagagcatttgttttggtctaaagagagggagaggatggaagctagggatgtggcggtgattgaggctttgcagtttttgaccggaaagacgttaataaagccgttatgttcatccccagaggagaggattaatggtaataatgagatccaaaagaacagtgagaatcagaatgagaatgaaagcgaccaaacaatgactaacaatgtttctattgaaggaagtggtagctgctggaatgagcaagggatcacaaagcttatggagataagaactagtatggactcggcgtttcaagagatattgggaggatgctcggatgattttttatgggaggaagtcgcagggaaaatggctcagttagggttcgatcagaaaagtgccttgttatgcaaggaaaagtgggagtggataagcaatggaaagaagaaaatgaacaagaaaaggaaggacaattcgtcgagctgcggcgtttactatccaataaccgaagaaaatacgatctacaacaatcaagaaagtggatataatgataatgatcagcgtcatcagatgaatgaacaaggcaatgtgggttcttcaacatcaaatgtaaacgcagccgctggaaacccgagcggtgcaatggccgctaatacaaactgcttcccgttcttcatgggagacggagatcagaatctgtgggagagttatggtttgaggctaaataaaggagagaatcatgagtga

SEQ ID NO: 287 - DNA, 1716 bp, Brassica napus
atggaagatcatccttctcagtacggtataccggagctccggcagctcatgaaaggtggagggaggacaacatcaccgtcgacttcttctcatttcccctctgatttctttggcttcaacctcactgcgccgccgcagcaacaccgtgtacagcagttcactactgatcatcaggagatgggtttcttgccacatggcatacatggattgggtgggagttcttcgacgaccgctggaaacaacagtaacttaaacgcgagtacttgtgggggaggagttgggtttggtgggtttctcgacggaggaggcttcagcggcggagatggcggagcaacggggagatggccgagacaagaaaccctaactctgctggagattagatctcgtcttgatcataagttcaaagaagctaatcaaaagggacctctctgggatgaagtttctaggattatgtctgaggaacatggataccaaaggagtgggaagaaatgcagagagaagtttgagaatctttacaaatactataaaaagactaaagaaggcaaagccggaagacaagacggtaaacactacagatttttccggcagctagaggcgctctacggagattccaacaacttggtttctattcccaaccataatacacagttcgtgagcaatgctcttcatggtttccacgctcaaaacgttactacaacaacgtctaacattcatagcgttgatggtcttcatggttttcatcatcagcaaagcctaagtctctctaacaactacaactcctcagagatggagctgatgacttcgtcttctgaagggaatgattctagtagtagaaggaagaagaggagtagttggaaagctaagatcaaggagttcattgatgtgagcatgaaaaggttgatagagaggcaagatgcttggcttgagaagttgacaaaggttatcgaagacaaagaggaacaaaggatgatgaaagaagaggaatggagaaagagggaagctgcaagggttgataaagagcatttgttttgggcaaaggagagggaacgaatggaaggtagggatgtagctgtgattgaggcattgcagtatttgaccggaaagcagttgataaagccattatgctcgtccccagaagaaagaaataatgagaatggaagcgatcaaacaatgactactaataatgtttctgttaaaggaagtggtagatgctgggatgagcaagagatcataaagcttagggagataagaagtagcatggactcagcgtttcaagaggtattggagggatcctcggatgagtttctatgggaggaagtcgctgcgaagttgactcaattagggtttgatcagaggagtgccttgatatgcaaggaaaagtgggaacggataagcaatggaaagatgaaagaaaagaagcaaatcaacaagaaaaggaaggagaattcgtcaagctgcggcgtgtactatccaagaaccgaagaaaatcagatctataacaatcaagaaagtggatacaatgataatgatcagcatcatcagaagatgaatgaacacggcaataatgttggttcttcaacttcaaacgcaaacgctggaaatccaagcggcgcaatggcggctagtacaaactgcttcccgttcttcatgggagatggagatcagaatttgtgggagagttatggtttgaggctaagtaaagaagagaatcagtga

SEQ ID NO: 288 - DNA, 1533 bp, Brassica napus
atggaagaccaccatactcagtacggtataccggaactccggcagctcatgaaaggcgaagggaggacgactacgacggcatcaccctccacttctcattttccttctgattttttgggcttcaacctcgccccggctgcgccgccgccgccgcaacaccaccgtgtacatcagttcaatactgacccggagatgtgtttcttgccacacggcatacacgggttgggtgggggttcttcgaccgctggaaataacagtaacttaaacataagcactagtggtgggggagttagatttagtggttttctcgacggaggaggtctcggcggaagtggaggaacgggacggtggccgagacaagaaaccctaactctgctggagattagatctcgtcttgatcataagttcaaagaagctaatcaaaagggacctttctgggatgaagtttctaggattatgtctgaggaatatggataccaaaggagtgggaagaaatgcagagagaagtttgagaatctttacaaatactataagaagactaaagaaggcaaagccggaagacaagacggtaaacactatagatttttccggcagcttgaggcgctctacggtgattccaacaacttggtttcatttcccaatcataacacacagttcatgagcagtgctcttcatggtttccacactcaaaacgctatgaacattcctacaacaacgtctaacattcatgaggtagatagtagtgttcatggtttcttacatcatcaaagcctaagtatttctaacaacaacaattcctcggagctggaactgatgacttcgtcttctgacgggaatgattctgatagtagaaggaaaaagaagagttggaaagctaaaatcaaggagttcattgatgtgaacatgaagaggttgatagagagacaagatatttggctcgagaagctgacaaaggttattgaagacaaagaggaacaaaggatgatgaaagaagaggaatggagaaagagtgaagctgcgagggttgagcaagtgcatttgttttgggctaaagagagggagaggatggaagctagggatgtggcggttcttgaggcattgcagtacttggccggaaagacgttgataaaaccgtcatgttcgtccccggaagagaggattaatggtaataatgagatccaaaacaatagtgagaatgaaaagtgggaatgtataagcaatggaatgaggaaagaaaagaagcaaataaacaagagaaggaaggagaattcgtcgagctgcggcgtgtactacccaaaaaccgaggaaaattcgatctacatcattcaagaaagtggatgtaatgataatgataagcatcatcagatgattgaacaaggcaatgtaggttcttcaacatcaaacgcagctgctggagatttgagaggcgcaatggctgctagtacaaactgcttcccgttcgtcatgggagatggagatcagaatttgtgggagagttatagtttgaggctaagtaaaggagagaatcagtga

SEQ ID NO: 289 - DNA, 1533 bp, Brassica napus
atggaagaccaccatactcagtacggtataccggaactccggcagctcatggaaggcgaagggaggacgactacgacggcatcaccgtccacttctcatttcccttctgattttttcggcttcaacctgaccccggccgcgccgccgccaccgcctcaacaccaccgtctacatcagttcactattaaccaggagatgggtttcttgccacatggcatacacgggttgggtgggggttcttcgacggctggaaataacagtaacttaaacatgagcaccagtggtggaggagttgggtttagtgggtttctcgacggaggaggtctcggcggaagcggaggaacgggacggtggccgagacaagaaaccctaactctgctggagattagatctcgtcttgatcataagttcaaagaagctaatcaaaagggacctttctgggatgaagtttctaggattatgtctgaggaatatagataccaaaggagtgggaagaaatgcagagagaagtttgagaatctttacaaatactataagaagactaaagaaggcaaagccggaagacaagacggtaaacactatagatttttccggcagcttgaggcgctctacggtgattccaacaacttggtttcttttcccaatcataacacacagttcatgagccatgctcttggtttccacactcaaaacgctatgaacattactgcaacaacgtctaacattcatgacgttgatagtgctcatggtcttttacatcatcaaagcctaagtatttctaacaactacaactcctccgagctggaactgatgacttcgtcttctgaagggaatgattctgatagtagaaggaaaaagaggagttggaaggctaagatcaaggagttcattgatgtgaacatgaagaggttgatagagagacaagatatttggctcgagaagctgacaaaggttattgaagacaaagaggaacaaaggatgatgaaagaagaggaatggagaaagagtgaagctgcgagggttgagcaagtgcatttgttttgggctaaagagagggagaggatggaagctagggatgtggcggttcttgaggcattgcagtacttggccggaaagacgttgataaaaccgtcatgttcgtccccggaagagaggattaatggtaataatgagatacaaaacaatagtgagaatgaaaagtgggaatgtataagcaatggaatgaggaaagaaaagaagcaaatcagcaagaaaaggaaggacaattcgtcgagctgcggcgtgtactatccaagaaccgaggaaaatgcgatctacaacaatcaagaaagtggatatgatgataatgatcagcatcatcatcagatgaatgaacaagacaatgtagtttcttcaacatcaaacgcagctgctggagatttgagaggcgcaatggctgctagtacaagctgcttcccgttcgtcatgggggatggagatcagaatttatgggagagttatagtttgaggctaagtaaaggagagaatcagtga

SEQ ID NO: 290 - DNA, 669 bp, Brassica napus
atggagagagataaatgcttgatgtcgatgaagttccgaccggtggtgacgagacaatcctcgaacgcggctttactctggccatttggggaagaatatggcggtggaggtggttgcatgtggccgcctaggtcttacacgtgcagcttttgcgggagagagttcaagtcggctcaagcactaggtggtcatatgaacgttcatcgaagagaccgagctcgtcttaaacaacaatctttatcatcttcatcaactgaccaaactacgcctcttgattatgatcatcaacaacaagtacaaaaacaacacgaagttcttgacgtgggaccaaagtttcccgtccaagaagattcgagaaagccaaatggaagtaagagagagataagtgatgttggtaatagtaatgttttagaaagttctatgaaaagatttgagcattacaatgatgaagtcaagactgatttatctatcggtctagtgagttctgagttcgattctcggaggaagcaactaatcaacggggttttggcgtccaagaaagcaaagactgatgtttcaagattgccgatgatggtagggttggtcatcggagtatccaagatcaacggtcatcacgaggagttggatcttgaactaaggctaggagctgatccaccaaaggttaactag

SEQ ID NO: 291 - DNA, 2031 bp, Glycine max
atctctctctctctcattctcttcttcttcttcgttaaccttctcctatggaaatggaggaccatcatcgtcaccatcatcagtatggcatcactgatctgaggcaactcgttaacggccctcggccgactcatttccccaccatgccgccaccgcccaaggcggagctgttccccggcgactccaacctgcaggctgcgacacaacaacactacgagatgatgatgtttgaggccgagaccgcaggatgcatcggtggagacgcctccactggaagatggcccagacaagagactctcactctccttgagatcagatctcgcctcgactctaaattcaaagaggctaatcaaaagggtcccttatgggatgaagtttctaggaacatgtctgaagaacatggatatcaaaggagtgggaaaaagtgcagggagaagtttgagaacctgtacaaatattacaagaagacaaaggaaggaaaagctggaagacaagatgggaagcattacaggttctttcgtcaacttgaagccttatatggtgaaaacagtaaccaagcctcggtgccagaaaccaattttggcagtggtagccttcgtttccacacaagcagccacaataataacccttctcaaacaaatcaagaaatgtttcagtctcagaagcattgtgacagcctaagcctcaccaactccactgatttggacacttcatcatcggatgacaatgatcaaaatagcactggcagggaactcaacaaggacaatgactccatggagaagaggagaaagagggtgagtggaagaagctggaaggtgaagataaaggacttcattgactcacagatgaggaagctggtggagaagcaagaggagtggttggataaactcacaaagacactggaacagaaggaaaaagagagagtgttaagagaagaagagtggaggagacaagaatctgtaaggttggagagggaacacaaattttgggctaaagagagagcatggattgaagcaagggatgctgctttaatggaggctttgcacaaattaacacgaaatgagataatgaagagtactcattctcacgagggtctaatggtaactggaattcaaatccacagtgaaaaccagaatgaagatgggagtgaaatactaaatagcactgctgccagaggtgctgaaagctggccagaatctgagattgcaaggcttcaacagttgagagctgagatggagacaaggtatatgcaaagtgggttttcagaagaggttatgtgggaggaaatagctaccaaaatggcttgttttggttacgaaaggagtgctttggtattcaaagagaaatgggaaagtataagcagcaactatgcaaggagtgccaaggatggaagcaagaagcgcaaggaagactcaagaagttgtttttacttcgataacagtgaccaatcttctctgtataaccaaggaggtgcctattgtgatatcaatgatcaaaggcacgagactgggaggctgcaaacaaatgacggttcttcaccttccaattcaaatgttggaaatgcagttgcgggtgataactgctttcccttcttgatgactgagggtggaaatttgtgggagaactatagcttaaaggttaataaagcatgccaaaaccagtgatgagagtgaaaaaaagtttgacacttgtaagaggcaagaaaatttcacagccttttatcagatgatctcacattatgtaagcaagagctaactgatgagggtcgtttatgtatagagactgatgatgataaggtgatcaatcttattatatttatgggaatcaaggtgaaaaataatgtgttcaagtcacgtacgtaagtttaatgagggagactagacattggcaaaatttcacaggtgagtatgacactaattcaggtgagtttctcttgtagcagatttcttttatgcgtgcaaaatggaatttgcaattttatattacttcacatgttgcatcttcaatgatgtttatatatcattagttgtt

SEQ ID NO: 292 - DNA, 2291 bp, Glycine max
atggaaatggaggaccatcatcagtatggcatcgctgatctgaggcagctgcccaaggcggagctgttcccaggcggcggcggcggccaccccaacctgcaggcggcgacacaacaacactacgagatgatgatgtttggtcgtcaagtggcggacataatacctcgttgtcttcacgacttcgcccccactgattccgccaccaacatcgccgttgccactcccaccaccaccactagcgcctctactcctccgcttagttgcttagaggccgagaccgcaggatgcatcggtggagacgcctccactggaagatggcccagacaagagactctcactctccttgagatcagatctcgcctcgactctaaattcaaagaggctaatcaaaaaggccccctatgggttgaagtttctaggatcatgtctgaagaacatggatatcaaaggagtgggaagaagtgcagggagaagttcgagaacctatacaaatattacaagaagacaaaggaagggaaagcaggaagacaagatgggaagcattacaggttctttcgtcaacttgaagccttatatggtgaaaacagtaaccaagcctcggtgccagaaaccaattttggcagtggtagccttcgtttccacacaagcagccacaacaacccttctcaaacaaatcaagaaatgtttcagtctcagaagcattgtgacagcctcagcctcaccaactccactgatttggacacgtcatcatcggacgacaatgatcagaatagcactggcgggggactcaaggacaatgactccatggagaagaggagaaagaggatgaggaagctggtggagaagcaagaggagtggttggataaactcacaaagacactggaacagaaggagaaggagagggtgttaagagaagaagagtggaggagacaagaagctgcaaggttggagagggaacacaaattttgggccaaagagagagcatggattgaagcaagggatgctgctctaatggaggctttgcacaaattaaccggaaacgggatcataaagagtactcattctcctgatggtttgatggtaactggaattcagaaccacagtgaaaaccagaatgaagatgggagtgaaatactaaatagcactactgccagaggtgctgaaagctggacagaatctgagattgcaaggcttcaacagttgagagctgagatggagacaaggtatatgcaaagtgggtgttcagaagaggttatgtgggaggaaatagctaccaaaatggcttgttttggttacgaaaggagtgctgtggtcttcaaagagaaatgggagagtataagtaactatgcaaggagtgtcaaggatggaagcaagaagcgcaaggaagactcaagaagttgtttttacttcgataacagtgaccaatcttctctgtataaccaaggaggtgcctattgtgatatcaacgatcaaaggcacaagactgggaggctgcaaacaaatgatggctcttcaccttccaattcaaatgttggaaatacagttgcggttgataactgctttcccttcttgatgactgagagtggaaatttgtgggagaactatagcttaaaggttaataaagcaagccaaaaccagtgatgagagtgaaattatatggttgacacttgtaagaggcaagaaaatttcgcagccttttatctcagatgatctcacattatgtaagcaagagctaactgatgagggtcgtttatgtatagagactgatgatgataaggtgctcaatcttattatatttatggaatcaaggtgaaaaataatgtgttcaagtcacgtacgtaagtttaatgagggagactacacattggcaaatatcactgaattgttggggtgtgagtatgacactaattcaggtgaatttctccattagctgatttcttttatgcgtgcaaatggaatttgcagttatattacttcacatgtcgcatcttccgataatgttcatatcattcattagttggtcaccgtctttctcctagtttccaccttccacacctatcttgccttttttttaattaatttttttggatatttatctgtgctggccttttgtgtttgtgtactgaaaggtagcaatttctttggtatttatttattggtcaatagttttatgaaccgggagaaagtgatgtattgatggatattgttgaagcatcggacattgttacaagcataaaaaaggccagatttacttattgaatgatctttttgaattagacaagcagttcttg

SEQ ID NO: 293 - DNA, 2285 bp, Glycine max
ggatccgactctgccgcttctccctctctaatttcttcactctctctctttctctctccttatttccaattcatcacaccctctctttctctctcaagtcccattcatggaaatggaagatcatcagcatcagcaccaccatcatcactttggcatgaacgatctaaggcaagtggtgaataacgggccgaggccggcccataccaccttcccctccatgccgccgcaccccacggaggagcttttccccggccaccaccaccgtaatctcactcctttacctactcatcatccccaacaacaacagcacttcgaggttatgatgtttggtcgagacataatgccacctggccttcacgactttgcttccacaccccatgattctgctgttgctaccaccaccatcaccctacccactccaccggttacttgcggctttgatgccgctgagggtgcaggttgcatcggtggagaccccttcactggaagatggcccagacaagagactctcactctccttgagatcagatctcgcttggaccctaaattcaaagaggctaatcacaaaggacccttatgggatgaagtctctaggatcatgtgtgaagaacatggatatcaaaggagtgggaaaaaatgcagagagaagtttgagaatttgtacaaatattacaagaagacaaaagaaggtaaggcaggaaggcatgatgggaagcattacagattctttcgtcaacttgaagccttatatggagaaaatagtaacacagtttcagtcccagaaaccaatgttgttgttggcagcattcattttcaaggcccttctcaaacaaatcaagataataataagtttcaatctcacaacaacaacaacaacaggcattgtgatagcctcagcctcactaactccactaattttgacacatcaacatctgaaggtcatgatggcaatgatcacagtatggagaatgagtccatggagaagaggataaagaggaagagtgggaggagttggaaggtgaagataaaggacttcattgactcacaaatgaggaagctggtggagaagcaaaaggagtggttggataagcttgtgaagacacttgaagagaaggagaaggagagaatgctaagagaggaagaatggaggaagcaagaggcaaacaggttagagagggagcaaaagttctgggccaaagagagagcatggattgaagcaagagatgctgctttgatggaggctttgcataagttaactggaagagaaataatgaaggttgaaactgatcctgagggtactataaatgtaatgactgcagctgaagttcaaaaccagaataacgaagatgagagtgaaattttgaacagcagtaatgttatcagaggtgctgatagctggcaagaatctgagatcacaagacttgaacagctgagagctgagatggagacaaggtttccatatagtgaaatttcagaagaggtttcatgggatgtagtagcaacaaagatggctgattttggctacgaaaggagtgctttgatgtgcaaagagaaatgggaaagtatcaacaaggaagagaagaatagcaagaatcgcaaggaaaacttatctagaaactgcttttacttcaagaacaatcatgaggatcaacaacaatcttctctatacgatcaaggaagtgcctattgtgatgatgatgtcaatgagcaagggaaagagattgagaggcttcaaacaaataatggttcttcttcaccttcaaaatccaatattgttggaaatgttgttccttctgatagttgctttcccttcctgatgggtgctgatcagggtggaaacttgtgggagaactatggcttaaagctcaataaagaaaatcaaaatcattgagtgaattgaagtatggttaatgactcgtataagaagtgttgaagtataaatataagtgagggaggcgaagtgacaaagttcacttgcgtgttggaacatgacaccaatttcaggtgagtttcttttttctttttatgcatgcaaatggaatcgacattgtattacctagtatgttgcaaattcaatgatgtttgcatcagttaattgatcactgtttttctccttccttcccggtgcttctttctagtgttaaatagtgcaggtttttggtgtttgtaaactgaaggtgggtaaattgaggtagtaatttcttccctttgtttttctgtaaatatttgtatgaacaagaagattaatgtgctcgtttatgcattaaaccaggtccttttttctc

SEQ ID NO: 294 - DNA, 708 bp, Glycine max
atggaggagtctcagtacttgctgtggatcaagagaaaacaaatcttgaacaacaacaacaactcatcatcatgggaggaaagggcttttgcagaagatgctgctaggatacttggtgggtgcatatggcctccaaggtcttactcatgcaatttctgtaaaagagagtttaggtctgctcaggctctagggggacacatgaatgtgcacaggagggacagggctagactcaaacaaagccttagtacagttgcaacaagcaaagtctcatcttctagggcctcaactatatctacccaagaaatttgttctcatcagcctaccatgtccctttattcttccttaattgggtggggacatcatcaccacatggagtctcctgattcagaaccaaaagggcaagtgaatgcaagggaagaatttttaaaaggtttgggttgtaatgattatgttgaaacaagtttgtctgtgggacaaagtgcagtgtttggccaaaaattaccaacaactgaatcatgtggggacgaaagcatcagttataaaagatcaaagacttctatgcctcctttgcctggagttttcctcaagccatgttcaaatgatagaaacctaacttttcagtctgcagaatttgtacttggactcaagcctggaatggaagacttagatcttgaactcaggctggggaagccacagaaagttatttag

SEQ ID NO: 295 - DNA, 2380 bp, Oryza Sativa
acatgtaccagacccccctcttctctgtagactgtaggggctcttggctttctctgcctgcctctcctctcccaccctctcttttgcccctttccagttgtccatgcccccatctttttcaccaccgtctctcctcttcctcctcccctaggtacagtcccccccggtttgcaatttccgtcatctccgtcgtccaaagttggaaggaaaggtggtggtggccatgcagcacccccagggtgccggcgacccgccgtatggcgtcgtccccgcgccgccgaccatggccgccgcgttcgacctgcctccggtgaccacgccggcgcccgccgctccaagtgacgtcctgctgccgacgcagccgcaggtgtcgggtcccgaagaattccccgctgccgccgtcaactccaacgacgacgacatgatgatggtcgacgacgtcgtcgtcgccggcggcgtcggcgggagcgggagcaccggcaaccggtggccgcgggaggagacgctggcgctcatcaggatccggtcggagatggacgccgccttccgcaacgccaccctcaaggcgcccgtctgggaggagctctccaggaggcttgcggaattggggtaccagaggagcggcaagaagtgcaaggagaagttcgagaacgtggacaagtactacaagcgcaccaaggaagggcgcaccgggcggcaagacgggaagagctaccgcttcttctcgcagctcgaggcgctccacgccgcggcgccgccgccgccgccgcagcaacggcagggcatgccggtggaggacccgcagccgctggcgatggcgtggatgatgttgcccggggcggcggacctcgggttcttgtcgatgtcgtcggagtctgagtcggacgatgagtccgacgaggaggaggaggaggaggaggcggtggcgccgggcggcggcggtcgggaggggcttggcgatgatggtgacggtgatggcgaagggggcagcagcaccaggaagctgatggccatgttcgaagggatgatgaggcaggtgacggagaagcaggacgcgatgcagcgggtgttcctggagacgctggagaagtgggaggcggagcgcaccgagcgggaggaggcgtggcggcggaaggaggtcgcccggatcaaccgcgagcgggagcagctctccaaggagcgcgccgcggcggcgtcccgcgacgccgcgctgatcgcgttcctccagcgcgtcggtggcgccggcggggagcccgtgaggctctccccttcgtccgccggcgccacccgccacgacgcggccgcggcggggctgcagctggtgcccgtgccggcgccgagagcgaaggcggaggacgcctgggcggcagcaggaggagacggcagcgggacgacggcgccgtcgcggtggcccaaggaggaggtgcaggcgctcatcgacctgcgcatggagaaggaggagcagtacaacgacatgggacccaagggcccgctgtgggaggagatcgccgccggcatgcagaggatcggctacaaccggagcgccaagcggtgtaaggagaagtgggagaacatcaacaagtacttcaagaaggtgaaggagagcaacaagcggcgccccgaggactccaagacctgcccttacttccaccagctcgacgccatctaccgcaagaagcacttcgctggcagaggcggcggcggcggcggcgtcacgatcgccgcctcccactccagcctcgccatcgtcaccgtctccgagcaggacaacccgagccagcgtgagctcgaggggaagagcagcaacgacgtcggcaacgtgcagctggcggtgcccctccttgtccacaacgccccagacaagaaggtggaaggctccgaaggcgaaccaaatgtcacagcagcagcggaggagacggacagcgacgagatgtgtggagaatacaccgacgatggcgacgacgacgacaaaatgcagtacaaaatagagttccagaagccaactgcgggcggcggcggcgacggcaacgacgcacccgtgccggcgacaactgcggcagcgacgagttcagccccaaccagcaacaccagcttccttgcggttcagtaggtggcagtgcgcgcagagtgagggggctaaagaaagccaggcaggcatcaccgtcttctttttcagttcaagagggtcacaattgccctattatactttttcagttgttttgctgtgatgttggcaacatcccgtataccatttgttgatttctttctgtggtaactagcaaactatccaaaaaaaaaaaaagcatgaaccaaattaggttcacagacagaggggttgttgagaagaataccagcataacaggttttatagttcatgata

SEQ ID NO: 296 - DNA, 3313 bp, Oryza Sativa
ttctctctctttctgcttagctagctcgagggttagctaagcttagcttctcctctctttttctttcctcttttcctcactggcttctttccagttagtactactactggtagctggtaaagcttattaggtcgtcgttgtggatggatatggatgccatggctccgtctctctcatagtccacactacgagctagttagccactcagcaagagagaggagaccgatcgagctctccatctccttcaagctcatgcatgcactagtgttgctgctgctgctcgtcgcatcgcaatctcatcatcatccccacctcaacacctcaattccaccactgtcacgccgggtctaagctagcaatcgatcgatcgatcgacagcgaaagattagtccgtctttttctttttgttaatttgttggcatgcagcagccggggatgccgccattctcggcagccggcggcgagggggcgccgtcgccgatcagcagccggccgccgccgccggagcaggcggcggcggcggcggcggaggagcagctcaacgggagctcactggagcacgacggggtgctgggcggcgaggagggcgaccggggcgggtcgtcggcgggcaaccggtggccgcggcaggagacgctggcgctgctcaagatccggtcggagatggacgccgccttccgggaagccgccctcaagggccccctctgggaggaagtctccaggaagctcgcggagatggggtacaagaggagcgccaagaagtgccgcgagaagttcgagaacgtcgacaagtactacaagcgcaccaaggacggccgcgccggccgcggcgacggcaagacctaccgcttcttcaccgagctcgaggccctccacggcgccgccgccgccaccgcgcgcccgccgccggtgtccctcgcgccggcgcccgtggccgtggcgccgccggccacccctgcgggtctctcggcgttgcgcgtccacgcctcgccgccgccgccgcctgtcaagcagcacgccgctccgccgccgcctgtcatggatgtggcggcgtgcgtgatgacgatggacgacgtgagcttctcgtcggggtcggacacggaggagacggcggaggagggcgggaagcggaagcggaggggcggcggaggcatcggcggcggcggcggcggcgggaaggcgatgaggatgttcgaggggctgatgcggcaggtgatggagcggcaggaggcgatgcagcagaggcttctggaggcgatcgagcggcgcgaccaggagaggatgatccgcgaggaggcgtggcggcggcaggaggtggcgcgcctcgcccgcgagcaggacgccctcgcccaggagcgcgccattgccgcctcccgcgacgccgccgtcatctccttcatacagagggtcaccggccagtccatcgccgccgtgccaccgccgccgctgcagcccacgccggtggcttccgctgcaccaccaccaccaccgcagcatcatcatcagcaaacaccaccaccgattcaggttcagccgcaccacataatgccgatgacgccgcagccccagctgcaaccaccgcagccgcagagcaaggaggccaacaccgtcgtccgggcggcgccgccgccgcaagagcagcacgacacggcggcgtccggcggcggcggcggcgcgtcgtcgtcgaggtggccgaaggcggaggtgcacgcgctgatccagctgcgcacagagctggagacgaggtaccaggactcggggcccaaggggcctctctgggaggacatctcggcggggatgcggcggctggggtacagccggagctccaagagatgcaaggagaagtgggagaacatcaacaagtacttcaagaaggtgaaggagagcaacaagaagcgccccgaggactccaagacatgcccctactaccaccagctcgacgcgctctaccgcaccaaggcggccaacgccgccgccgccgcctcagcctcgccggctccggcgaccaccaccgtgcttgccccggtgccgctctcccagacgccgccgcacgtcgaccacggcggcagcaacggcaatgggaatgggtgggcgagtgccaacaacggcggcggcggcagcagctccgggggcatgcaaacgaaggctagcaacaatggcacggcgacggccggcgggctgcccgtcgtttcggtcgccggcggcaacggcaacggcaacggcgtggcggcgacgacggataacaagggatcgaagcaggtgcccgtcgcgaaggagacggcggggcagaggcagccacagccgttggccatgaaccacaactacggcaacgacagaatggccgacgacatggacagcgacagcatggacgacgacgacgacgacgacgaatttgacgacgacgaaaacgacgacgacatcggcggtggcaagatgcaggtgcagtacgagacgtcgtcccatttccaacggccgcagctgcagaaccagaacgtcgtcgtcggccggccaaacgcgagcggcggcggcggcggtggcgctccgacgacaccggcgggccctccgccgcctgcggcaacaagtgggacgtcattcttggcctgcgtccagtgacgacgacgacgacgacacgacgacatatatacaccaagagaaatatgctcaggtggtggcgatctcgatctcgatctactatctcctgtaccatatggacctagctagctagccatccacttgcattctttaactcctacaactacactatatcgatccctagttagcataagctcgttaaaacctgaaggccaaaatttactgttccttgcctagattccaagttccaacaacctgatcttttccgtatatttcttctcctttcctgcacataacattatttatcgtcgtatacaccttgtacatgtcacacactcaccatgtccatacaaacataaatggtattgggggacctcctggagggagagatctagctagagagaagataaaaaggaggtgagatatctttgtacatgtgaagggttttgcgtacgtaggtacatgtctgtttttctctttagtgctgtattaacagtccagtgctcaagtactacaagctacggcaaccgagagaaaggcatgcatgatcatgcttcttttttttgggtatactttcggatgttcttttttttttctttttagaaattttactgtctgttatgtgttatgcaagttttctttgtcatactgttggtgaattgtacacttggtaattgtaaaatcattgaggttaatatatatgcgggcatattacatcctt

SEQ ID NO: 297 - DNA, 2583 bp, Oryza Sativa
atggccatttattacctggaaagggagggattaacccacaacatgccaatgcatggccatttttatactcctctgcccctgaaccattggcacgcggataccaccaacgcggctgacatgacacgtgggcccatgcgcatgtgggccccacatgtcagtggcatgaattttatatttttcatctcaaaagaaaaggtattgatgagagtagaaatggtgagctctcctgatgtactgatcattccatcacctccattccccagtggtaacactcgtgggggaggaggaggaggaggaggtagtagcatgcagcagcagcagccagggggaggagggggaggggtgcagcagttcggcgcggtggcgccggagatgtcgccattctcgccggcgggaggaggcggcggggggcggatctccatggcggaggccgcgtcgcccatcagcagccggccgccgccggcgcagcagcagttcgacgagctcggcgtaggcggcggaggcggaggcggaggtgggtttgacgccgaggcgctggcggcggcggcggtcggcgaggagggagccagcggcggcgcgggggggaaccggtggccgcggcaggagacgctggcgctgctcaagatccggtcggacatggacgccgcgttccgggacgccaccctcaagggcccgctctgggaggaggtctccaggaagctggcggaggagggttaccggaggagcgcgaagaagtgcaaggagaagttcgagaacgtgcacaagtattacaagcgcaccaaggagagccgcgcggggcgcaacgacggcaagacgtaccgcttcttcacgcagctcgaggcgctgcacggcaccgccgccggcgtcgtggcagcgccatcgccggtgacgtcgctggccccgccgccggcgacggctgtgggggtgtccggcggggtgcgcgcccccgccgagccgccgcccgcggtggtgatggggaacgtgatgagcttctcgacgtcgaacacggaggagtattccgacgaggaggactccgacgacgaggggaccgaggacatgggcggcggcggcggtgatgagagggggaagaggaagaggttgtcggagggtggcgccgccgcgggcgtcggtgatggagcggcaggaggcgatgcagcagcggtttctggaggccatcgagaagcgggagcaggaccggatgatccgcgaggaggcgtggcggcggcaggagatgcgcgcctcgcccgcgagcaggagatccccgcaggagcgcgccacgtgggcgacgccgccgtcgtgtccttcatacagaagatcaccgggcagaccatcccaatgccgcccatcatcgccgcccccgccatcaccgtcatgcccccaccggcgccatcccagcagcctcagccgccgccaccgccgtctcaccccacccccatcacctccgtcgcgccagctccgccgccgccgccaccagcagcagcagcagcagcagcatcccagccatcgccgcaggccaccaagtcgccattgccggcgacgccgcagacgcaaagcagcatggacattgtcatgacggccgccgaggcgcacgacgcggggtacgacgggtccggcggcggcggggggcagccgtcgtcgtcgcggtggcccaaggcggaggtgcacgcgctgatccagctgcggagcaacctggacaaccggtaccaggaggccgggccgaagggcccgctgtgggaggagatctccgccggcatgcggcggctgggctacagccggagctccaagaggtgcaaggagaagtgggagaacatcaacaagtacttcaagaaggtcaaggagagcaacaagaagcgccccgaggactccaagacctgcccctacttccaccagctcgacgccctctaccgcaacaaggcggctctcaactcctcctcctcctccgccgccgccgccgcaccggccctcccgccgccggagcacgcggagccggcggtgacagtcgccgcgccgatctcgcagacaccgccgccgccgccgccacagcccgtgacgacgaccaagaacggcaacggcaccagcagtacaaacggcgcgaacggcgaaggaggaggaggcggctccgggggcatgcaaatgcaggcgagcaacggcagcgtcgtcgccggcaacaagttcttcaccggcgcggcggcgaagaagccagaggacattatgaaggagatgatggagcagaggccgcagcagccggcggcggcgaacaacgccttcaaccgaacggacggcggcggtggcggcggcggcgtggacagcgacaacatggacgaggacgacgaggatgactacgacgacgatgacgacgacgacgacgacgacgtcgacggcaacaagatgcagtacgagatccagttccagcatcagcaccaccaccagcagccgccgcagcaccgccaccagcagagcgtcgtcagaccgaacgccgccgcctccgcggccgccggcggcaacccgcccggcaccgccgcccccgccacggcggcggccgcaacgacgaccaccggatctttcttggcaatggtccagtga

SEQ ID NO: 298 - DNA, 1264 bp, Oryza Sativa
aaatcaagcctctttctaacttccccggctagcttgcagctcttcttccccccttctgctccggccctctcatagctagatcctcacatgtactgctgtcttcctcaatcctgggttcagatgtttcacctcttctctatctagccctctttccatcatctttggcacctgcaagagctagagctgtaaaagttagttagtgtcatttgatggatccagcaaggtactggatcttggccaggaggaagctgggagatcagaaggcgcctctcttccccacccctcacatcaccatcggcgccggcggcagctccacctcctactacgagtcatgggaggaacgtgccttcgcggaagactccgcagggcatctcgggggctgcatctggccgccgaggtcctactcctgcagcttctgcggccgtgagttccggtcggcgcaggcgctgggcgggcacatgaacgtccaccggagggaccgggcaaggctcaagctctctggggttgtggaggacggcaccggcggcgaaagccacggcatgccgccaaaccaaaactacatgatacaaccatgccctccccaaattggcaccctgcagcacgcctacagcccaaaccctagaagtggcagtattctcgctgctgacactaaccctaattccatatgtgatgttgtcgcgtaccctgctagatccttgcttcaagttgcagctgctagaactgccttgggcaaacaagtcctgaacgcccctcttgtctcatcgaagtcgccgtcggctggtagagaacatggtaagagggagacgttgtttcttggtgctgttcgattggcacaggatcatgacacggtgagttctaatcttgacctgcgtgttgggaaaaatgaattgaagataactactgttttggggtgccgatcaagaagggactttatgtacgataacgaccgcgcggatgatgaaaagactgttgaagcaagtcacaagaaaagaagaatcgatttggaggtaaaccccctgattctaacttcttcaaccagtaatcatcaacagcaagatggtggtgatgaccaacatcatgaaaagatactaaaactttatcgtagctcctcggttgaagaactagatcttgagcttagactcggggaagccccaaaagaacagtagatttcatatccactgttgtatctcaacttgattacaaatgtttaatttgtatttattcaccactcgtgtttcattgaaatgttggtttgcactatctg

SEQ ID NO: 299 - DNA, 1613 bp, Brassica napus
acagtagcaattagggttccgatttgacttgagtcaactcaatcggagacggagagaaagaagactcgagcatccaatcacatccggaaaggcggcggagtaatggaagagcttccgagcataaccgtgagtcagcgcgagcagtttctggtggagaacgatgtgtttgggatgtacagttacttcgacaccagtgacatcgctactcagaaattcatggtggagattcagcgagacaagcagcttgattatctgatgaatggcttaaggcagctaggcccatcgttctcgtccttagatgctaatcgaccgtgggtttgctactggatcattcattcaattgctttgcttggggagtctgtggatgatgacttagaaaacaatgcaatcgactttcttggacgttgccagggttctgatggtggatatggtggtggtcctggccaacttccacatcttgcaacaagttatgctgcagtgaatacacttgttacattaggaggtgagaaagccttctcttcaattaacagagaacaaatggcttgtttcttaagacgaatgaaggatacaaatggaggtttcaggatgcataatatgggagaaatagatgtgcgagcgtgctacactgcgatttcgatcgcaagcatcctgaacattgtggatgatgaactcacccgaggcttaggagattacatcttgagttgccaaacttatgaaggtggcattggaggggaacctggctccgaagctcatggtgggtacacctactgtgggttggctactatgattttaatcaatgaagtcgaccgcttgaatttggattcattaatgaattgggttgtacatcgacaaggagtagaaatgggattccaaggtaggacgaacaaattggtcgatggttgctacactttttggcaggcagccccttgtgttctactacagcgatttttttcatcccaggatatggcacctcatggatcatcatcacgtatgtcacaagggacagatgaagatcacgaggaatatgctcatgatgaagatgatcctgaagacagtgatgaagatgattctgatgaggatagcgatgaagattcagggaatggtcaccaagttcatcacacatctacctacattgacaggagaattcaacctgtttttgatagcctcggcttgcaaagatatgtgctcttgtgctctcaggtcgctgatggtggattcagagacaagctgaggaaacccagggacttctaccacacatgttactgtctaagcggtctttccgtggctcaacacgcttggtcaaaagacgaggacactcctcctttgactcgtgacattttgggtggctacgcaaaccaccttgaacctgttcacctcctccacaacgttgtcatggatcggtacaacgaagctatcgagttcttccatagagcagcatgaccccttctcgtcacatacgggaaactcctgtgactgatggtacgaaagagtttctcgtcctgttgtatgtgtgtacttttcaacagaagtttttgtaatttaaacctttaacatattgagtttttatttaaaaatcatattacgattcaaagattacgttgattgttaaaaaa

SEQ ID NO: 300 - DNA, 1148 bp, Brassica napus
atcgtaagatagttgactccaacacgcaaacaacaaaaacaaaaagaaaaacctaattttctggaagataaagcttaacggaaagcgaaagcaagctcgttttttaagggcttccagcttttgatatttcttgtttttacagatactgatattgaaacgaagcagagatgtgtagtctggcgacaaatctcttattcccatcgaagatgaaacccgcttttacagagaaacagagcactagctcactcttcgttactacaaataacagatccaagatgaagaacagatctgctgttcctgttgcaagattatttggaccggcgatttttgaagcctccaaattgaaagtatcattcttaggagttgatgagaagaagcatccatcaaagctcccaagaacttacactcttactcacagtgacataaccgctaagctaactttagctatttctcaatctatcaataattctcagttgcagggatgggctaatagattgttccgggacgaagtagtggccgagtggaagaaagtgaagggtaaaatgtctcttcacgttcattgccacattagcggaggccatttccttttggatctcatagcgaagcttcggtactacatattttgtaaggaattaccggtggtattgaaagcttttgttcatggggatgggaacttgttgaatagttacccggagctacaagaatctcccgtttgggtttatttccattcaaacatccccgagtacaataaggttgaatgttgggggccgctttgggaggccacgcagcacaaccacgatggaaagagaacacgcaaaaaatgcgaaactctgccggagctagcatgtcccgatgagtgcaagtgttgctttccgtcggttagcacgatcccatggtctcatcgtcattatcaacatggcagaggggatgagaatgagaatttcaaattaaagtgatagatctcgtgtggatatttctttttctttttcctttggtggttaggaaaagttggaaggaatatgaaagttatttgtttagtgttaacagtaagtagatggaagttgtccaacagtgttagtattactatcctttgtattatatatttacgaagtccatgtagaaataaagactttgttacgtgtgttaaa

SEQ ID NO: 301 - DNA, 1177 bp, Brassica napus
gcaaacaccatttaacacacacaagacaagaaccaacccaatacgcatcatcagaagaagaaccctaaattccaggaagagagaagataaatatctcaagcttcaagcaatcgttaaagttccaagctttcgatatcgatctatctggtttccaaagcctcgctaaagggtctctctgtcttattctgaaaaaaaattgaagcttgatttggttcgagagagagaaagagagagagaagatatgaatagtttgtcagcgaacatgttgttaccgacaaggctgaaaccagcttattcagacaaacggggtaatagtacgaactctctccccgtctccaatacaagatccaagaggaagaaccaatcagttgttcctatggcaagattgtttggaccggcgattttcgaatcatccaagttgaaagtattgtttctaggtgttgatgacaagaagcatccaccaacgcttccaaggacttacactctcactcacagtgacattacagctaaactaactttagctatttctcactccattaacaattctcagttgcaaggatgggcaaataggctatacagagatgaagtggtagcagaatggaagaaagtcaaaggggacatgtctcttcacgtccactgtcacattagcggaggccatttcctcttagatctcttcccaaagcttagatactacatcttttccaaagaactacctgttgtgttgaaggctattgttcatggagacggcaacttgttgaacaactatcccgatttacaagaagctcttgtttgggtttatttccattctaatgccgatgagttcaacagagtcgagtgttggggtccgctttgggaagctacttcgtctgatggtcacaggactcagactcttcctgaaactcggtgcaaggatgaatgcagttgttgtttcccgcaggttagctcgattccgtggtctcatagtcttagtaacgaaggtgttggtggctactctgggactcaatccgagggaatgtctactcctaatccggagaaactctaatgattcaacggacataatacaagtcttttgtatatggaaaccttttggtagatctaatattagtctggtttggtgtacataatgtggtataggaaagtaacgattatttgtatatgtttaatagtattaaattaa

SEQ ID NO: 302 - DNA, 1230 bp, Brassica napus
cacacttcaaaagcgtcaacataaagttaggccaaacaccccccccccccccacaccacagaaacccaaaaaaaaaaagagttagagagagatggagagttttccaatcatcaatctcgagaagcttaacggagaagagagaggactcacgatggagaagatcaaagacgcttgtgaaaactggggattctttgagtgtgtgaaccatgggattccacacgagctacttgacagagtggagaagatgaccaaggaacactacaagaagtgcatggaagacagattcaaggagtccattaagaacagaggactcgactctgttcggtctgaagtcaatgacgttgactgggagtcaactttctaccttaagcaccttcctgcctccaatatatcccatgtccctgatctcgacgacgattacaggacgttgatgaaagagttcgccggaaagatagagaagttgtcggaggagctattggatctgctttgcgagaatcttggattggagaagggttatctgaagaaggtgttttacgggtcgaaaagcccgacttttggaaccaaagtgagcaactatccaccttgtcctaaaccggatttaataaaggggctccgcgcacataccgacgcaggcggcatcatcctcctcttccaggacgataaagtcagtggacttcagctccttaaggacggcgagtgggtcgatgttcctccggttaagcattctatcgtcgttaatctcggtgaccagcttgaggtgataaccaatgggaagtacaagagcgtggagcatagagtgatagctcaaacggacggagaaggaagaatgtccattgcatcattctacaaccctggaagcgactctgttatttttccggcgccggagttgatcggaaaagagaatgagaagaaggataactatccaaaatttgtgtttgaggattacatgaaactttactctgctgtcaagtttcaggccaaagaaccaaggtttgaagccatgaaggctatggagacaactgtggccaacaatgttggaccattggccactgcctaaatgaatgcattataaatttataatacatagtcattccatataatttctttatattcgaataatttttatgtagtatatgttgttgtatgtgtatgaattatgaaacattatttaaatgtaattgaaatttatatttgttgtatgtggagtttttaattttatattattttatt

SEQ ID NO: 303 - DNA, 3698 bp, Brassica napus
gtcgtttcccataagactcaccgagtcgactcgtttcccccaaatcacccgccggcatcacaaccacctgagagcccttcgtcaacccaagctcggatttctccatggagatttcctctgctgaatccgaatcgctatccatctctggcgcggccgcttcttccgaggccgcatcggaatcgtcggtatcttctccctcatcctcctccctctccgcttcgagccaggcctctcccaccgccttctccgccgtggatcccgcgtctgcgacggctacagcttccagatacgttgatgatgacgaagacgaggaggacgtttgcaggatctgcagaaacccgggggaagcggataatccgcttcggtacccgtgcgcttgcagcgggagcatcaagttcgtgcatcaggattgtctccttcagtggcttaatcatagcaacgctcgtcaatgcgaggtttgtaagcatccgttttcgttctcaccagtgtatgctgagaatgctccaacgaggctccctttccaggagtttgtagttgggatcgcgatgaaagcttgccacgtgttgcagttctttctccggttgagtttcgtgctttctgtgtggcttctcaccattccctttattacgttttggatttggcggttggcttttgtgaggagctttggtgaagctcagaggctgttcttaagccacatctccaccaccgtgattctcaccgactgtttgcacgggttcttgctctcggcgagtattgtctttattttcctcggggcgacttcgttgagggattactttaggcatttgcgggagttgggaggacaggatgagagagaagatgaaggggagaggaacggtgttcgtgctgcgaggagacctgctgggcagggtaataggaaccttgctggagaggggaatgttgaagatgctggagatcagggtgcgggtgttggtcaggtcaatagaaggaatcctgaaaatgttctggcgaggttggatatacaagcggctcgtctcgaggctcaggttgaacaaatgtttgatggtttggatgacgctgatggtgctgaagatgttccgtttgacgagctggttggaatgcagggtccggtgtttcatttggttgagaatgcctttactgttctggcaagcaatatgatattccttggggttgtgatctttgtgcctttcactttaggacgggttatattgtatcatctgtcgtggctttttgctgctgctagaggccctgccctgaccgcatcaatgcattttattgactcagcattggaaaatacaactctgaagagtgcgttgacttctgtctcaaatttgactaacgagggccaagaaaatggactggttggtcagctctcagaaatggtgaaagtcaacggaagtgaactgaacggggtaaacagtactctatctgttgctgctgatctcttaaaaggttctgttacaggatcgtccaagctatctgatgtgacaacgctgactgttgggtacatgtttatagtctttctggttttcctttacctcgggatcattgcactgattcgttatgccaagggtgagccactgactgttgggagattctatggtatcgcttcaatggtagaagccgtaccatcactccttagacaattcttggcagcaatgaggcatctgatgactatgattaaagttgcctttctattggtcatcgagcttggagtcttcccgctgatgtgtgggtggtggctagatgtttgcacggttaggatgtttggtaaaacaatgtctcacagagtacagtttctatcaatttctcctctggcaagctcacttgttcattgggttgttggaatcatgtacatgctgcaaataagcatcttcgttagccttcttcgaggggttcttcgccctggagtcttgtatttccttcgtgatcccgcagatcctaattataatccattccgagatttgattgatgatccagtacacaagcatgctcggagggttttgttatctgttgcagtttacggtagtttgattgtcatgctggtatttttaccagtcaagctagctatccggatggctccttcaatcttcccgctcgacatatctgtatccgacccattcactgagattccggccgacatgcttctgtttcaaatatgcataccatttatcatcgagcatttcagacttcggaccacaatcaagtcccttctacgctgctggttcacagccgtcggttgggcccttggtttgacagacttcctcttaccaagaccagaggacaacgttggtcaggacaatggaattggtgaaccaggaaggcagaacagagcacaggtcggtggacctgacagggccatagctgcgcttccagcagctgatgaccctaacagaaatcttccccgtgccggtaatgtcaacgccggtgaggaatatgaagatgatgaagaacaatctgatacagacaggtacaactttgtgatccggataatccttctactactttatgcatgggttactctgcttctcttcaattcggcattgatagtcgttccagtttctctcgggcgtgctctgttcagtgccatcccagttctcccaataacgcatggcatcaaatgcaatgatctgtatgctttcgttattggcacatatgccttttggactgccatatctgggggaaggtatgctatcgagcatgtcaagtcgaggaggacttcagtcttgcttaaccaaatatggaaatggtgtgggattgtcttcaagagctcggtactattagcaatatgggtttttatcattccggtactgatcggacttctgtttgagcttttggtgatcgtcccaatgagagtcccagtagatgaaagtcctgtcttccttctgtatcaagattgggctcttggcctcatctttttgaagatctggactagactggtaatgttggatcatatgcttccgataatggatgatagctggagagcaaagtttgagagagtaagagaagatggattctcgaggcttcaagggttgtgggtactgagagagattgtattcccgattgtaatgaagcttctaacggcattatgcgttccctacgttctggccagaggagtgttcccgatgctcggctatccactagttgtgaactcggcggtctacagattcgcttggataggttgtctctcggtgagcctcttttgcttctgcgcaaagagatgccacgtctggttcagaaaccttcacaactccatccgtgatgaccgttacctcattggtcggaggctccataactttggggaagctgccttggctaaccaaaacctaaaccagagcagtgaggatgctggaggagatggtggggttttgataggacgtgagggagatgcggatactggactaaggctcagacgtgcgatccaacaagaagcttagaaaagagtagtgttgtgtcaggtggtgaaccaaacaacagttggaaactggtcactgagtccgtttaacatttgtgtacttctacttaatccgtaagggattggctttaaaagattttttatttgtcgatgtgtaaattatatatatccgtttctcctttttgtgtgtgttattaaaactgaaagatctttagaaataagtttataacgcttcgttagttcatatttctattgtaatgtttttggaaaacgattgtttttt

SEQ ID NO: 304 - DNA, 1634 bp, Glycine max
gaagatagtgtagtaagtgctaacaaaacaagcttgactcttaaactctcgcagtttctggcgaaaccatgagtgaagagagcgagagagatacgaatccggcggcggcgccaccgtgtccgacggtgagtcaacgggaccagtggatggtagagtcgcaggtgtttcagatttaccaactctttgccaccattcctggcagcgcccaaaacctcatgtatctatcacagttagagctgcaacgcgataatcacatgcagtatctctccaaaggcctacgccatctcagttccgcgttttctgtcttggacgctaatcgaccctggctctgttactggatcttccattccattgctttgctgggagaatccgtcgacgacgaactcgaagataacactatcgattttcttaaccgttgccaggatccgaatggtggatatgctgggggaccaggccagatgcctcacattgccacaacatatgctgcagttaatacacttattactttgggtggtcagaaatccctggcatcaattaatagagataaactgtatgggtttctgcggcggatgaagcaatcaaatgggggattcaggatgcatgatgaaggagaaattgatgttcgagcttgctacactgccatttctgttgcaagtgttttgaacattttggatgatgagctgatcaagaatgttggagactacattttaagctgtcaaacatatgagggtggcattgcaggtgaacctggttctgaggctcatggtgggtacaccttttgtggattagctacaatgattctgattggtgaggttaatcgcttggatctgcctcgactagttgaatgggcggtattccggcaaggtaaggaatgtggattccaggggagaacaaataaattggtggatggatgctattccttttggcagggaggtgccgttgctctattgcaaagattatcttccattatcaataaacaaatggaagaggcatcacagacttttacgatatctgatgtatctgaagcaaaagaaagtttggatgggacctctagtcatgcaacatgccatggtaagcatgaaggcactagtcagtcctgttcagctgattataaaagtatcggttataactttattaatgagtggagagcacaagaaccactttttcacagcattgctttacagcaatatattctcttatgtgcacaggagcaagcgggtggactgagagacaaaccgggtaaacgtagagatcactatcacacatgttactgtttaagtggactctcattgtgccagtatagctggtcaaagcacccagattctccaccgctgcctaacctagtattgggcccctactctaatctcttagaaccaatccatcccctctttaatgttgtcttggaacgatatcgtgaagctcatgtattcttctttactgagtcctgaccactgacctggttttagctgccaacatctttatgtatactgtaaaataaattcattggatttggaaaaatgcatataaatgtaaaacagcattggattgataggttttatgtctccgggttttgatgattattgataatttgacatggatatgtactgttccgaatggcaagatgtgatctgtaa

SEQ ID NO: 305 - DNA, 1651 bp, Glycine max
tgcgtagcatagcttctcgcagtttctggcgataccatgagtgaagagagcgagagagagacaaatccgccgccgccgccgccgtgtccgacggtgagtcaacgtgagcaatggatggtagagtcgcaggtgtttcagatttaccaactcttcgccaccattcctcgcaacgcccaaaccctcatgttggagcttcaacgcgataatcacatgcagtatgtctccaaaggccttcgccatctcagttccgcattttccgttttggacgctaatcgaccctggctctgctactggatcttccactccattgctttgtcgggagaatccgtcgatgatgaactcgaagataacgctatcgattttcttaaccgttgccaggatccgaatggtggatatgccgggggaccaggccagatgcctcatattgccacaacttatgctgctgttaattcacttattactttgggtggtgagaaatccctggcatcaattaatagagataaactgtatgggtttctgcggcggatgaagcaaccaaatggtggattcaggatgcatgatgaaggtgaaattgatgttcgagcttgctacactgccatttctgttgcaagtgttttgaacattttggatgatgagctgatccagaatgttggagactacattataagctgtcaaacatatgagggtggcattgctggtgagcctggttctgaggctcatggtgggtacaccttttgtggattagctacaatgattctgattggtgaggttaatcacttggatctgcctcgattagttgactgggtggtattccgacaaggtaaggaatgtggattccaggggagaacaaataaactggtggatggatgctattccttttggcagggaggtgctgttgctctattgcaaagattatcttctattatcaacaaacagatggaagagacatcacagatttttgcggtatcttatgtatctgaagcaaaagaaagtttggatggaacctctagtcatgcaacatgccgtggtgagcatgaaggcaccagtgaatccagttcatctgattttaaaaatattgcctataaatttattaatgagtggagagcacaagaaccactttttcacagtattgctttacagcaatatattctcttatgtgcacaggagcaagagggtggactgagagacaaaccgggtaaacgtagagatcattatcacacatgttactgtttaagtggactctcattgtgccagtatagttggtcaaagcacccagattctccaccactgcctaatctagtattaggcccctactctaatctcttagaaccaatccaccccctctttaatgttgtcttgggacgatatcgtgaagctcatgaattcttctttactgagtcgtgaccactggttttagctaccaacaactttatttgtataatgtaaaataaattcattggaacatataaatgtaaaacagcattggattgctcgggttttatgtctctgggttttgatgattattgataacttgatatggatatgtattgtgttgaagggttgacgtgagatcatgtaaccgacctcacctagtgagataagcctttgctgttattattgttgttgatatgaatatgtagtttcttaaaat

SEQ ID NO: 306 - DNA, 1310 bp, Glycine max
cacacacacattactacacgcatctaaacactcctccgaactataatacagttttcttattttcattgttgaagctcacaagcaaaggctaaagtagattctattctcctcaagcaaaacctatagctcccccacactcctccagtacttgaataaaagctaaataaatattaaagcctttccttcatcaaggtactgtttgatctttgaatttcagtcctcaaagattggaacaacaggaacatgtgtactctcacaactgttcctgtgctcccttctaagcttaacaagccttcgctttctccgcaccacaattctctttttccctactgtggaagacgggtcgggaagaagaacaaagcaatggttcctgttgcaaggttgttcgggccagccatatttgaagcctcaaaactgaaggttttgttcttaggagtggacgaaaataaacacccaggaaatctcccaaggacttatacgctaacccatagtgatataaccgctaagctcaccttggcaatctctcaaaccataaataattctcagctgcaggggtggtacaacagatttcaaagggacgaagtggtggcacagtggaaaaaggtgaagggaaggatgtctctgcacgttcactgccacattagtggaggtcattttctcttggatatattagcaaggttaagatacttcatcttctgcaaggagctaccagtggtgttgaaggccgtcgttcacggcgatgaaaacctattcaacagctacccagaattgcaagatgccttggtttgggtctactttcactcaaacattccagaattcaacaaggtggaatgttggggcccactgaaggaagcgtcagcacccacaggtggggtccaggaggaggggttggcaattccacagccatgccaagaagaatgccaatgttgctttccaccgcttacgttgagccctattcagtggtctaaacaagttcccagccgccattacgaaccttgtgatgggattgggacccaacaaaatctataaacagccaaactactacaattcacagttacggggatgctgccaaattggcaaattccctgtatacaaattaaatattcgaaacccatttcaatgtaaataaggaagctcgtatttgcaatttttttttttttatatatttttctttactttctttgttatgatttttctttcgtaagaaattaaattagttcatgtataatatgtctgtatgcatggttatttcaaagaattaaacagatttttgtaaaaaaaaaaaaaaaaaaaaaaaaaaaaaaaaaaaa

SEQ ID NO: 307 - DNA, 1081 bp, Glycine max
ttctcctcaagcaaaacctagagctcccagactcctccactacttagaatattaaaagccccttccttcatcaaggtactactgtttcatcttccctcaaagattggaacaacaacaggaacatgggtactctaacaactgttcctgtgctcccttctaagcttaacaagccttcgctttctccgcgtcacaattctctttttccctactacggaagacgcgtcgggaagaagaacaaagcaatggttcctgttgctaggttgttcgggccagccatatttgaagcctcaaagcttaaggttttattcttaggagtggacgaaaataaacacccaggaaatctcccaaggacttatactctaacccatagtgatataaccgctaagctcaccttggcaatctctcaaaccataaataattctcagttacaggggtggtacaacagattgcaaagggacgaagtggtggcacagtggaagaaggtgaagggaaagatgtctctgcacgtacactgccacatcagtggtggtcattttctcttagatatattagcaaggttacgatacttcatcttctgcaaggagctaccagtggtgttgaaggcggtggttcacggcgacgaaaacctattcaacaactacccagaattgcaagatgccttggtttgggtttactttcactcaaacattccagaattcaacaaggtggaatgttggggcccactgaaggaagcgtcagcaccaataggtggggccaaggaagagagtgagcaagaaactcttctaagtaaggagggcttggcaattccacagccatgccaagaggaatgcgaatgttgctttccaccgctgacgttaagcccaattcagtggtctcaacaagttcccagccaccattacgaaccttgtgatgggattgagacccaacaaagtctataaacttccaaactatcatacacagaaaagaaaaaaaataaaatcacatcacagttacagggatgctggcaaattcatatgccatttccctgtatacatcattaggacaaatcaaatattcaaaacccatttcaatgtaaagaagg

SEQ ID NO: 308 - DNA, 1333 bp, Glycine max
atgactcccctcacagcatatagtcacataggctattaagggtgagatatatagaaaaacaaaggagaaaagatagaaatggagaagtttccagttgttgacatggggaaccttaataatgaagagagatcagcaaccatggagataatcaaagatgcctgtgagaactggggtttctttgagttggtgaaccatgggatatccatagagttgatggacaccgtggagaggatgacaaaagagcactacaaaaagtgtatggagcaaaggttcaaagaaatggtagcaagcaaaggtttggagtctgctcaatctgaaatcaatgatttggattgggaaagcactttctttttgcgccaccttcctgcctctaacatctcagagatccctgatcttgatgaagattacaggaaggtaatgaaggattttgctgtggaactggaggaactggcagagctagttcttgacttgctgtgtgagaatcttgggctagagaaagggtatctgaagaaggtgttctatggatcaaagggcccaaattttggtaccaaagttagcaactaccctccttgtccgaagccagagctgataaaggggctcagagctcacacagatgctggtggcatcattctactcttccaagatcacaaggtcagtggattacagctcctcaaagatggccactggattgatgtcctcccaatgcgccactccattgtcatcaaccttggagaccaacttgaggtcatcaccaatggcaaatacaagagtgtgatgcaccgtgtgattactcaaacggatggtaacagaatgtccatagcctcgttttacaatccaggcaatgatgcattgatcgctccagcaccagccttggtgaaggaagatgagactagccaagtttatcccaagtttgtttttgatgattacatgaagctctatgctggccttaaatttcaggccaaagaaccaagatttcaagctatgaaggccacggagtcatccaacattaatttaggccccatagcaacggtctaagcctcagattgaagcattatattaattataatatatatgttaactgagattaccggtatctttctttgctatggatgcgccgttatgcagcatgtgtatttcacaaggaactctctctctccctctccctctccctcatgattcttctttggcttattatggtagtttaaaaataaaacattagcttgatatggtagtttatttgtgtaatgtatgtatgtgatggttaagttggtgtcatgtattgatgcacttcttttatcagaaagtaacccgatcttagccattttacaaggaa

SEQ ID NO: 309 - DNA, 3865 bp, Glycine max
ggcattcttgggaaaaccctaaatccccacgccaaaatttccgatcactctcttccattttctctcatctcttcttcgcacttttttaatttctctctccctttttccgtcccccaccgattcgctccccgacccgccctgactcgccaccgactcgctccccggccggttcggtccaaaccgccatggagatcgctcacgagccatcgccttccctcgacggaagccccttcgccgccgccgagactctcgcgaattctccgtcgtcctcgtcgtcttccccttcctcctcctcctcctccgcctcatcgccgcgcggcgcgaagggaaaagaggtcgaatccaccgcgtcggggacggcgacatctccggcgccggcgaagtatgacgacgaagatgaggaggaagaggacgtgtgccgaatttgccggaaccccggcgacgccgagaatccgcttcgttatccttgcgcatgcagcgggagcatcaaattcgtgcatcaggattgtctccttcagtggcttaatcacagcaacgcgcgccaatgcgaggtctgcaagcatgcattctccttctctccagtgtatgctgagaatgccccagctaggttaccttttcaagagtttgtggttggaatggcaatgaaagcttgccatgttcttcaattctttttgcgcctgagttttgtgctatctgtgtggctcttaattatacctttcataacattctggatatggcgattagcttttgtaaggagtttaggtgaagcccagaggttattcttaagccatttatcgacagcagttattctgactgattgcctccatggtttcctactttctgcaagtattgtcttcattttccttggggccacttctttgagagattactttaggcatttgcgagaaattgggggacaggatgccgatagagaagatgaagtggacagaaatggtgctcgaattgctagaaggcctcctgggcaagctaatcgtaacatcaacaatggtgatgggaatggtgaagatgctggtggagtgcaaggaattgcaggggcaggtcaagtaattagaagaaatgctgaaaacgttgctgcacggtgggagatgcaagcagctcgtcttgaggcacatgtcgagcagatgttcgatggtctggatgatgctgatggagcagaagatgttccctttgatgaacttgttggcatgcagggtccagtttttcatttggttgaaaatgcatttacagtgctggctagcaatatgattttccttggtgttgtaatctttgtgccattttcattgggccgtatcatactccattatctatcctggttcttctcaactgctagtggccctgtgttgtcagctgtggccccacttgcagacacatctctttctctagcaaatattactttgaagaatgcattaacagctgttaaaaacatgtcatctgaaactcaagaaaatggatcaattggtcaggttgcagaaatgctgaaagcaaatgctagtgaaatgagtgaaatgtcaaacataacttctgcttcagctgttatcttgaaaggagtgtcaattggaacttcaaggatttctgatgttaccactctagctattggatatgtttttatattgactctaattttctgctactttggaattgttgctttaattcgttacacaaagggtgagcctttgaccatgggaaggttttatggcattgcttctatagcagagacaattccatctcttttcaggcagtttttggcagcaatgaggcatttgatgactatggttaaggttgctttccttttagtcattgaactgggggtatttcctttgatgtgtgggtggtggctcgatgtttgtaccattcagatgtttgggaagacaatggttcacagagttcagttcttctctgcatcccctttagcaagctcattggttcattgggttgttggtattgtgtatatgctacaaattagcatatttgtcagccttcttagaggggttttacgtaatggagttttatactttcttcgggaccctgctgatccaaactacaatccgttccgtgatctgatagatgatcctgtgcacaaacatgctcgcagggttctgttatctgttgcagtttatgggagtctgattgtgatgctggtattcttgcctgtcaaacatgccatgcggatggcaccttcgattttcccgcttgacatatcggtatctgatccattcactgaaattccagctgacatgcttctctttcagatttgtatcccatttgctattgagcattttaaattgaggacaactattaaatccctacttcgatattggtttactgctgttggttgggcacttggtttgactgatttcttactgcctaaacctgatgagagtgttaatcaagaaaatggaaatggggagccagctagacaggaaaggctacaaatagtacaagctggagtgcatgatcagggtttggtgccatttgcaggcgatgatttgaacagggccattatcacagtggaagaaatgaatgctgaagaggattatgataatgatgagcagtctgattctgacagttacgccttcgtgcttcgcattgtgcttttactggtgattgcttggatgactctccttgtcttcaactctgctctgatagttgtaccaatttcccttggacggacactttttaattctattcctcgccttcccataactcatgggattaaatgcaatgatctgtatgcatttatcattggaagctatgtgatctggactgctgttgctggagttagatactcgattgagcaaataagaaaaaggagatcttctgttttgtttggccaaatatggaagtggtgtggcattcttgtgaagagttctgcacttctgtctatatggatatttgttatcccagtgctaattgggcttctttttgagcttttggtcatcgtgccaatgagagttccagtggatgaaagtccagtattcctcctttatcaagactgggcattaggccttatatttctcaagatatggactagattggttatgttggaccacatgatgcctctggtggatgaaagttggcgagtcaaatttgagagagtgagagaggatggtttctccaggctgcaaggtctttgggtccttcgggagatcgtacttcctatcataatgaagctgttgacagcattatgtgtaccctacgttttggccaaaggtgtatttccagtgcttgggtatcccttggtgataaattctgccgtctatcggtttgcatggttgggatgcctctctttcagtttcgtgtgcttctgtgccaagagattccatgtctggttcacaaatctccataattcaatacgcgatgaccgatatctgattggccggaggttgcataactttggagaacatgctgagaaagcaaatgtggcagaaactaattcaggggagaaggacactattttactaggtacaggtttaaaccaacaagatcgcgaagcagatgtcggactacggttaaggcacgtaaatcaacaggtgggctgaattgtattttcaggtaggaaggccactttgtaggttgtgatgcctcgtgatggtttatgaatcactgatgtatactctacacttgtgttgggttagttataacacattgtcatgacacacctgtgatgtagttaacgttaacattttgtgcgtgttacttgtttaaaatttagctaataggaggaaaataaaattgttgatagctcaaagtttttttttatttaaagaaattctttgtgaaatagggaagcggaaggcatgctatacttaaataacatagttatagtagttaattgttatggtaa

SEQ ID NO: 310 - DNA, 105 bp, Glycine max
atggaagtaaatattcttgtatttattgctactgtactgtttattttagttcctactgcttttttacttataatttatgtaaaaacggtaagtcaaagtgattaa

SEQ ID NO: 311 - DNA, 1115 bp, Brassica napus
atggacgtccctatcgtcgacctaagcaaccccaacgaagatctcgtggcacgtgcggtcgtgaaagcgagcgaagaatggggaattttccaggtggttaaccacgggatcccgccggagctgatacggcggttgaaagaagttgggacaaagttcttcgagcttcccgagacggagaaggaagccgtcgcgaagccagaagactccgtggacgtagaaggatacagaaccaagtaccagaaagatctagaaggtagaaacgcatggatcgatcatctctttcaccgcatttggcccccgtccagagttagttacagattctggcctaagcttcctatggattacagggaggtgaatgaggattacgcaaaacaccttaagaaactatcggagaaaatcatggaatggctatcagaggggttaggtttacgacgtgaggcattgatagaaggtttaggcggcgaaacggtggaatatttaatgaagatcaattactatccgccgtgtcctgatcaagatttggtcataggagctcctgatcacactgatgtcaatggtatcacattcctagttgctaatgaagcgttagggcttcaggcgttcaaagataatcactggatcgacgtcaaatataccacttccggaatcatcgtcatcgttggcgaccaattccataggatgagtaatgggaagtatatgagtgcaaagcatcgagcgacaatggataaagagaagacgagaatatcatggccggtttttgtggaatctagccttgatcacgagttcgcacctttgcgggagctgataactggcgaagataatgctcctaagttcaagccttatgtctacaaagacttcaaatttcgtaagcttaagaagcttcctctcgactgagaaacagaggcgttgtcatccgttatttcgttaacggattattattcataaagcttgcatgcttaaattattaacgttaaagtttaagtgaatcatcaatgtggtgtctcgcgtccttatatcctttgataatatatgttgaaatttcggttgatttcaaatttgatatattgcgtgtgggtgtttacatataaaattatgaagtaacttttggaaatttt

SEQ ID NO: 312 - DNA, 1191 bp, Brassica napus
agctattgtttactattgaaaagaaagtagaaaagagagtgcactgaaaacgatggacgtccctatcgtcgaccttaagtaaccccaacgaagatctcgtggcacgtgcggtcgtgaaagcgagcgaagaatggggaattttccaggtggttaaccacgggatcctgccggagctgatacggcggttgaaagaagttgggacagagttcttcgagcttcccgagacggagaaggaagctgttgcgaagccagaagactccatggacgtagaaggatacagaaccaagtaccagaaagatctagaaggtagaaacgcatgggtcgatcatctctttcaccgcatttggcccccgtccagagtcagttacagattctggcctaagcttcctatggattacagggaggtgaatgaggattacgcaaaacaccttaagaaactatcggagaaaatcatggaatggctatcagaggggttaggtttacgacgtgaggcattgatagaaggtttaggcggcgaaacggtggaatatttaatgaagatcaattactatccgccgtgtcatgatcaagatttggtcataggagctcctgatcacactgatgtcaatggtatcacattcctagttgctaatgaagcgttagggcttcaggcgttcaaagataatcactggatcgacatcaaatataccacttccggaatcatcgtcatcgttggcgaccaattccataggatcagtaatgggaagtatatgagtgcaaagcatcgagcgacgatggataaagagaagacgagaatatcatggccgatttttgtggaatctagccttgatcacgagtttgcacctttgcgggagctgataactggcgaagacaatgctcctaagttcaagccttatgtctacaaagacttcaaatttcgtaagcttaagaagcttcctctcgactgaaaaacagaggcgtgatcatccgttgtttcgttatcggattattattcataaagcttgcatgcttaaattattaacgttaaagtttaagtgaatcatcaatgtggtgtctcgcgtccttattatatcctttaataattatatgttaaaatttcggttgatttcaaatttgatgtattgcgtgtgggtgtttacatataaaattatgaagtaacttttggaaattttattttaccaaaaaaaaaaa

SEQ ID NO: 313 - DNA, 1001 bp, Brassica napus
attatttatcatcattcatcaaacctcatcattatcaaaatattcaaacctaaccccaaactcaaaccatgtcttcttccaactgtccgtcaccgttacccaccgtcacgaaacttcaagttgattccgttacttttccaccgtccgtcatctcaccggcttcctccaaccctctcttcctcggtggcgcaggtgtgcgaggtttggatatccaaggaaaattcgtgatcttcaccgtcatcggagtttacctagatcctgtctccgtcccgtcactctccgttaagtggaaaggtaaaacgacagaggagttaacggaatccgtccctttcttccgtgaaatcgtcacaggctcgtttgagaaattcatcaaagtgacgatgaagctgccgttaacgggacaacaatattcagagaaagtaacggagaactgtgtggcgatatggaaatcgttagggatttacacagactctgaggctaaagctgtggagagatttttggaagtcttcaaagacgaaacgttccctcctggtgcatccatcctcttcgctctcgcctctaaaggctctcttacggttgcgttttcgaaagatgatagcattcctgaaacgggaaaagcggtgatcgaaaataagttgttggcagaggcagttcttgaatcgatcattggaaagaacggtgtgtctcctggggctaggttgagtgttgccgagagattagctcagctgatgaatagtgacaaggtcgaagaagatgcaacaaagactgatcaagaggaagctaacaatctccccctaggagataaactggccaaagagaactgatggaatgggagttttttcttggttttttagtgctttatgtttctatatctaataacgttctgtttagttcccattgtatgttttaaatctgtttctgttcgtaagacttattaaataatcacatggagttggttcaaaaatagtaaaataccaaacgaatcaaaatgtattaccagc

SEQ ID NO: 314 - DNA, 1260 bp, Brassica napus
atggctccaggaactctaaatgagcttgccggagagactaagctcaactccaagtttgtccgggacgaggacgaacgtcccaaggttgcctacaatgagtttagcacggagatccccgtgatctctctcgccggaatcgacgatgttggtgagaaaagaggagagatctgtcgacagatcgttgaggcttgtgagaactggggtgtttttcaggtggtcgatcatggagtggatactagtttggtggccgatatgactcgtctcgctcgagacttcttcgcgttacctcctgaggagaaactcaagttcgacatgtctggtggtaaaaagggaggattcattgtctctagtcatcttcagggagagtctgttcaagattggagagagatcgtgacgtatttctcgtacccggtgagaaacagagactactcacggtggccgactaagccggaaggatgggtgaaagtgacggaggagtacagcgagaggctgatgggtttggcttgtaaacttcttgaggttttgtctgaagctatggggctcgagaaagaggcactcaccaatgcatgcgtcgatatggaccagaaaatagttgttaactattacccaaaatgccctcagcctgatctaaccctcgggctcaagcgtcacactgaccctggaaccatcactttgctgctccaagaccaagttggtggtttacaagccacacgagacgatgggaagacatggattacagttcagcctgttgaaggagcttttgttgttaatcttggcgaccatggtcactatctgagcaacgggaggttcaagaacgctgaccaccaggcggtggtgaactccaactcgagcagactatcaatagccacgttccagaatccggcgccggaagcaaccgtgtatccgcttaaagtgagagaaggagagaagccgatcttggaggagccaattacgtttgcggagatgtataagagaaagatgagtagagatctcgagctggctcgcctcaagaagctggcgaaagaagagcatgaccacaaggaagctgccaagcctctagaccaaatcatcgcttagactccttgtgttggccctttactattgtgttggttcggttgtgtaagtcggtactaaaattaagttatgtcatgttgggtgaatttgagttttatatcgttctatcatataaaaatattgataataatgtctatgacgtaaacatcacatgccactaatgtcaatgcattatcgacaacaacc

SEQ ID NO: 315 - DNA, 2154 bp, Brassica napus
atgactaatctttacctcacaatccttctccctactttcatattccttatcgttctcgtcttatctcgccgccgcaacaaccgtctccctccaggtccaaacccatggcccatcatcggaaacctccctcacatgggccctaaaccccatcaaacactagccgccatggtaaccacatacggacctatcctccacctacggctagggttcgccgacgttgtggttgccgcctctaaatccgtggccgaacagttcttgaaagttcatgatgccaatttcgctagccgaccacctaactccggagccaaacacatggcatataactatcaagatcttgtctttgcgccttatggacaacgatggagaatgttgaggaagattagttctgttcatttattttcagctaaagctcttgaagatttcaaacatgttcgacaggaagaggttggaacactcatgcgcgagctagcgcgtgcaaacacgaaaccagtgaacctaggccagttggtaaacatgtgcgtactcaacgcccttggacgagagatgatcggacggcgactgttcggcgccgatgccgatcacaaagcggaggagtttcgatcaatggttacagaaatgatggctctcgccggagtattcaacattggagatttcgtgcccgcacttgattgtttagatttacaaggcgtcgctggtaaaatgaaacgtctacacaagaggttcgacgcttttctatcgtcgatcttggaagaacacgaggcgatgaagaacggccaggatcaaaagcacacggacatgcttagcactttaatctcgcttaagggaactgattttgatggtgagggtggaactctaactgatacagagatcaaagccttgctattgaacatgtttacggccggaactgacacgtcagcaagtacggtggactgggccatagctgaattaatccgtcacccggagataatgagaaaagcccaagaagagcttgactccgtcgtgggacgtggaaggcccattaacgagtcggacctttctcagcttccttaccttcaggaagaggttggaacactcatgcgcgagctagcgcgtgcaaacacgaaaccagtgaacctaggccagttggtaaacatgtgcgtactcaacgcccttggacgagagatgatcggacggcgactgttcggcgccgatgccgatcacaaagcggaggagtttcgatcaatggtcacagaaatgatggctctcgccggagtattcaacatcggagatttcgtgcccgcacttgattgtttagatttacaaggcgtcgctggtaaaatgaaacgtctacacaagaggttcgacgcttttctatcgtcgatcttggaagagcacgagacgatgaagaacggccaggatcaaaagcacacggacatgcttagcactttaatctcgcttaagggaactgattttgacggtgagggtggaactctaacggatactgagatcaaagccttgctattgaacatgtttacggccggaactgacacgtcagcaagtacggtggactgggccatagctgaattaatccgtcacccggaaataatgagaaaagcccaagaagagcttgattccgtcgtcggacgtggaaggcccattaacgagtcggacctttctcagcttccgtaccttcaggcggttatcaaagagaatttcaggctccatccaccaacaccactctcgttaccacacatcgcatcagagagctgtgagatcaacggctatcatatccccaaaggatcaacccttttaacaaacatatgggccatagcccgtgacccggaccaatggaccgacccgttatcgtttcgacccgagagatttttacccggtggtgaaaaagccggcgttgatgtgaaaggaaacgacttcgagcttataccgttcggagccgggaggagaatctgcgccgggttgagtttagggctacggacgattcagttactgacggcgacgcttgttcacggatttgaatgggaactggccggaggagttacgccggagaagctcaacatggaggagacttatgggattactctacaaagagcggttcctttggttgtgcatcctaagccaaggttggatatgagtgcttacggactcggatcggcttaa

SEQ ID NO: 316 - DNA, 1178 bp, Brassica napus
gtctagtcactcagtaacttcactttcttgtcctctcacttgcgcgctctctttctccattgtttgagtcttgtggtcagtgagaaatcataaatacataaaaccgccggagaaaaatgggaagagcgccgtgttgcgagaaggtcgggataaagagagggcggtggacggcggaggaagaccagattctctccagctacattcagtccaacggtgaaggctcttggagatctctccccaaaaatgccggattaagaagatgtggaaaaagctgtagattgagatggataaattatcttagatcagatctcaagcgcgggaacataactccagaagaagaagacctcgttgttaaattgcattccactttgggaaacaggtggtcactaattgcgagtcatctaccagggagaacagacaacgaaatcaaaaactattggaactctcatctccgccgtaaactccacaacttcatcatcagaaagccatccatctctcacaacgtccttgctgtagtcataaacgctcctccaaggtcaccgcgtccgcctacaaaacgcagaccagggagaaccagcagatccaccatgaaacctaaaactcaccacccaaaaattcgaaagatgaagaaaacgtctgaaccgccggagccagaagccagcgtagcggttaaagcaggagaagaaacattaatgatggagttaaacgaagccgaggctgagctaggaccatgcaactactatgtaacctgtcacgaaggaggagcttgtcgcaataatgataataacaatagcagcattgattgcgataaaggagtttcatcctttgatgaagacatcgttgatcttttgttggacgaatcagctccaagccacgtgttcacttcgtgtgagagtctcgactgtcttcagtcttgtccgtcgatggagacgtttctcaactatgagcatcaagtcaacaatgcgttcacgggtgagtttattgactgggacgactgtgtttggcaacaagggaatgacaataacatttgcgatgagaaagagggttctgattcaattgtgtcgtggcttttggacggtgaagatgaggccacgatcggggaaagtaattgcgagaactctggagaaccactggatcatgacgaggaaaatgcgttggtcgcctggcttctctcttga

SEQ ID NO: 317 - DNA, 1365 bp, Brassica napus
actcaccttctctcactcaagggtccaaaaagtgtttttctcttttgtgttcttctcttttctcttttttgagagaagagatgggaagggctccttgttgtgagaagataggactcaagagagggagatggactgccgaggaagatgagatcctcactaactatatccaaaccaatggggaaggttcttggcggtctttgcctaagaaagctggattgttgagatgtggaaagagctgtagactaaggtggataaactatttgagaagggacttgaaaagaggaaatattacagccgaggaagaagaaaccatcgtcaagttgcattcccttctcggcaacagatggtcgcatattgcaacacatctaccaggaagaacagacaatgaaattaaaaactattggaattcacatctcagccgcaaaatctatgccttcactaccgtcaccggggatgagcacagtctaaaggttgacgatttagtcctgaataaatcttcttcttcttccttgggagccaagaacacgaacaagaccaagaagaagaaaggaagaactagtaggtcatccatgaagaaacacaagcaaatggtgacggcctcacaatgtctcccacaacctaaagagctagagagtgagatcagtgagggatggaacagcgggaactacgaaggaaagtcgttgggagcgtatgaatggttggatggtgagatagagcggctcatgagtagtttcgtctgggaatgtgctagtgaagaggctgtgattagcatgaatgatgatgaccctgatcagaacaaggtgtgtgagagcggggacaatattagttgttgtgtggatttgtttgaggaagaacagggaaagcttggtagcctacacgttgatcaagacatgaatattgaaaaagaaagagaagagagtattttgagttcgaattcaaatgaaagtggtgataaagactggtgggttggtctatgtgattcttcagaagttggatttgggattaatgatgagttgcttggttgggagtttcaaggtggtttgacttgtcaaactgatgatctctgggatctctcagattttggagaaatacagcaagtggatagcatatgagactgtgtataacccgaaaaaacatcgatctttttattgtaaagtctagtgttttgtttggttatagtgggtcttgaggttgtgtattagctgttcgagtgtgttaagggagttaattaggatatatagcctctagtttagaccagtttgaagcacattatgtttgttttgtcgtgactattatcgttgttgtttgtagtgtttggtttgtttgttgttagagcatgttcattgcaataacccctaagtgggc

SEQ ID NO: 318 - DNA, 922 bp, Brassica napus
aataagtgaaagtatcagggagatcagccctcagtttttccatatgagtcagtaagctattgccctgtcataaggtgaatattacgtggcggtatagacttggccgggctgagagattatgggcagagcgacatggttcgatgccgacgggacgaagagaggaggatggacggacgaggaagaccaaaaactcgtcgcttatatcaacgaatacggcatcggcgactggcgttttctccctcgcaaagctggtagtttgcagagatgtggaaagagctgcagattgagatggcttaactatctaaggcctggggtcaagaaaggcaaattcactcctgaagaagaagaagctattatcaatttccagtctgttctcgggaacagatgggctgccatagcacagcagatgccgggtcgatcagacaacgacatcaaaaaccattggaactcttgtctcaagaaaaggctcgagagaaacggaatcgaccaaatgacccaccaaccaatcattaacctcgccgtcaaaacaccgtcgttcaacatagattgcggcaactcttcctcctcgatggtgagtccatctccgtctttctcctcctccggctcagccagtctccttaacaggcttgccacgggtatctcatctagagaacacggtgtcgacaggatcaagaatatcttgtcggatccgagaacgccaatcattactactcaagaagaagagtttgaagagccaaacaaggatcatgggaaggctttagcaggtgatgatcaggaagatgattttctgatgtgggacgaggaaaatatgaggcattttatggatgagattggtcaaatggactttgaaactaacggagtctataaccctagttcgtcatcaccgtatggtgtctatgagactggcctacttgatgactga

SEQ ID NO: 319 - DNA, 1002 bp, Glycine max
atggacacattgagggtgcaaagcttagcttctcagtcgaaggaaacgattcctgcagagtttgttaggtcagagacagagcaaccaggcatcacaaccgttcatggaacccaacttggggttcctataatcgatttcagtaaccctgatgaagacaaggtgctgcatgaaattatggaagcaagtcgtgactggggcatgttccaaattgtgaaccatgagatacctagccaagttatagaaaaacttcaagccgtggggaaagagttctttgagttaccacaggaagaaaaggaacaatatgctaagcctgcagactcaacatctatagaaggttatggaacaaagcttcaaaaggaggtggataacaagaaaggttgggtggaccatttattccacaggatatggccaccttcggacattaactatcgcttctggcccaagaatcctccttcttacagagaggctaatgaggaatatgataagtacctacatggggttgttgataagttgttcgaaagcatgtcaatagggttggggcttgaaaaacatgaactaaaggaattcgcagggggtgataacttggttcaccttttaaaggtaaactactacccaccttgtccatgccctgatcttgtcctcggcgtgccatctcatacggacatgtcctgcattacccttcttgtgcccaatcatgttcagggccttcaagcctcaagagatggccattggtacgacgttaagtatatccccaatgctttggtcattcacattggagatcaaatggagataatgagcaatggaaaatacaaggccgtgcttcacaggactacagtgagtaaagacgaaacaagaatttcgtggccagtgttcgtagagccccaaccagagcacgaagtggggcctcacccaaagctggttaaccaagacaacccaccaaaatataagagcaagaaatacaaggattatgcttactgtaagctcaataagatccctcagtaa

SEQ ID NO: 320 - DNA, 1294 bp, Glycine max
cacaaaattgagaaaaatttaaagaaatcaacacacacaaacacaacaacatatggaggtgctaagggtgcaaaccatagcttccaaatccaaagatgctgccatcccagccatgtttgttagggcagagacagagcaaccaggcatcacaaccgttcaaggggtgaaccttgaggtgccaattattgattttagtgacccagatgaagggaaagtggtgcatgagattttggaggcaagtagggactggggcatgttccaaattgtgaaccatgacatacctagtgatgttataagaaagttgcaaagtgttgggaaaatgttctttgagttgccacaagaggaaaaagagttgattgctaagcctgctgggtctgattctattgaagggtatggcacaaagcttcagaaagaggtgaatggcaagaaagggtgggtggatcatttgttccacattgtgtggcctccttcctccatcaactacagtttctggccccaaaaccccccttcttacagggaagttaatgaggaatattgcaagcacctaagaggagtggtagacaaattgttcaaaagtatgtcggtagggttggggcttgaagagaatgagctaaaggagggtgcaaatgaagatgacatgcattatcttttaaaaatcaattattacccaccttgtccatgtcctgatctggtcttgggtgtgccaccacacacagacatgtcctacctcacaattctggtgcctaacgaggtgcagggccttcaagcatgtagggatggccattggtacgatgttaagtatgtccccaatgccctcgttattcacattggcgaccaaatggagatactgagcaatggaaaatataaggcagtttttcacagaacaacagtgaacaaagatgagacaagaatgtcgtggcccgtgttcatagaacccaaaaaggaacaagaagttggtcctcacccaaagttggttaaccaagacaatccaccaaaatacaaaaccaagaaatacaaggattatgcttattgtaagctcaataagatccctcaatgaatgaagtgggcactacgagataattatagctcatggtttctctgttttgttatttaatttatggaatgaaagtgtgacttgtgggaagtagattaaataagatctgtgactaatgttggtttctctgttttgttatttaatttatggaatgaaagtgtgacttgtgggaagtagattaaataagatctgtgactaatgttggattaatcttatgcttttgaagtaaataaagatgac

SEQ ID NO: 321 - DNA, 1033 bp, Glycine max
cacatcacattcaataacaatggcaatggcatttccgtccgtaacctctgtaactgtggagaacgtgacattccctcccaccgtgaagcctccctgctcccccaacaccttcttcctcgccggcgccggcgtcaggggcctccaaattcatcacgctttcgttaaattcactgccatctgcatttacctccaatacgacgccctttccttcctctccgttaagtggaaaaccaagtctactcaccagttaacggaatccgaccaattcttctcagatatcgttacaggtccattcgagaaatttatgcaggtgacaatgatcaaacccttgacggggcagcaatactcagagaaagtggcagaaaattgtgtggccatttggaggtctcttgggatttatacagattcagaagccgaagcaatagacaagtttctttctgttttcaaagacctaacattcccaccaggctcctctatccttttcactgtctcacccaatggatcattaacgataagtttctctggtgatgaaaccattccagaagttacgagtgctgttatagagaataaactactctcagaggctgtgttggagtcaatgataggtaagaatggcgtttcccctgcagcaaaacagagtttggcctccagattatctcacttattcaaagagcctggggtttgtgaccctcaatctcataagtgaactcattatatcatcaacccaagatcaaaatcccttaccactctgctgtgactttcagtactgtgctactaataaataaagggcaaattacagtttttctaagtgctaaacttctagcaacattattgtgttgttcttactgtccatgtctaagtactgaactgctgtatttgatttttcgttgggaattgaagcaactaattacattacttaactgtttgcttattttagaattaatcaaacacgctccatcaagtgtgcatgaaaataatataaaataataaataagcacatggcatgactaaggtcttggtcattttcatgggt

SEQ ID NO: 322 - DNA, 1451 bp, Glycine max
atccttcaaacttgaagcattgcattctgctatttaattccactacgtacacgcacattctcctcaaagacaacaatggcaccaacagccaagactctgacttacctggcccaggagaaaaccctagaatcgagcttcgttcgggacgaggaggagcgtcccaaggttgcctacaacgaattcagcgacgagatcccagtgatttctcttgccggaatcgacgaggtggatggacgcagaagagagatttgtgagaagatcgtggaggcttgcgagaattggggtatattccaggttgttgatcacggtgtggatcaacaactcgtggccgagatgacccgtctcgccaaagagttctttgctttgccaccggacgagaagcttcgttttgatatgtccggcgccaaaaagggtggattcattgtctccagccatctccaaggggaatcggtgcaggactggagagaaatagtgacatacttttcgtacccaaaaagagagagggactattcaaggtggccagacacgccagaagggtggagatcggtgactgaggaatacagcgacaaagtaatgggtctagcttgcaagctcatggaggtgttgtccgaagcaatggggttagagaaagagggtttaagcaaagcatgtgttgacatggaccagaaggtggtggttaattactaccccaaatgccctcaacctgacctcactcttggcctgaagcgccacacggatccgggcactatcaccttgctgcttcaggaccaagtgggtggacttcaagccaccagggacaatggcaaaacatggatcaccgttcagcctgtggaggctgccttcgtcgtcaatcttggagatcatgctcattatctgagcaatggaaggttcaagaatgctgatcaccaagcggtggtgaactcaaaccatagccgtttgtccatagccacttttcaaaacccagcaccaaatgcaactgtttaccctctgaagataagagaaggagagaagcctgtgatggaggaaccaatcacttttgctgaaatgtacaggaggaagatgagcaaggacattgagattgcaaggatgaagaagctggctaaggaaaagcatttgcaggaccttgagaatgaaaagcatttgcaagaacttgatcagaaggcaaaacttgaggccaagcctttgaaggagattcttgcttaattaataataattacatatgtatcatttgcatgcccccttggtgtttttagtattttttaagggccatgaattaataatagtccttacctttgtgcttttgtacgtcttatgatttatcctttgtggggatatcatgtgttgtgttcagttgcctatgtcttattagctagctggctcatctatgtataccttatatttgcctctattataaatgaaaataagtggcactgtctttattattggctgca

SEQ ID NO: 323 - DNA, 1896 bp, Glycine max
caacatatcaactaaagatactacacataactacatcatctcaaaacctagtctgaaaccatagcacaaaatcaaccatgtctccattgattgttgccttggctacaatcgcagcagcaatcctcatatatcgtataataaagttcataacacgcccatccctccccctcccaccgggccctaaaccatggcccatagtgggaaacttgccacacatgggcccggtgccgcaccactccctcgcggcgttggcccgcatccacggcccgttgatgcacctccgcctcggcttcgtcgatgtcgtggttgccgcgtcggcctcggtggcggaacagttcttgaagattcatgactctaatttcagcagccggccaccgaacgccggcgcgaaatatatagcttataactaccaagatctggtgtttgccccctacggcccacgctggcgattgctccggaaactcacctccgttcacctcttctccggcaaggccatgaatgaatttagacacttgcgtcaggaagaggtagctagattgacatgcaacttggcaagttcagacacaaaagcagtgaatttgggacaattattgaatgtatgcaccaccaacgcattagcgagggcaatgattggacgaagagtgtttaacgatggcaatggagggtgtgatcctagggctgatgagtttaaggctatggtgatggaggtgatggtgttggctggagttttcaacattggtgactttattccttccttggagtggctagaccttcaaggggtgcaagctaagatgaaaaaattacacaaaagatttgatgcatttttaaccagcattattgaggagcacaataacagttcttccaagaatgagaatcataagaatttcttgagtatcttattgtcacttaaagatgtgagggatgatcatggaaaccatctcactgataccgagattaaagcactacttctgaacatgtttacggcaggaactgacacatcatcaagcaccacagaatgggccattgcggaactaataaaaaacccacaaattttggccaaactccaacaagagttggacaccgttgtgggtcgagataggagtgtcaaagaagaggacttggcccacctcccatacttacaagctgttatcaaggaaaccttcagactccacccatcaacccctctttctgtgccacgtgctgctgccgagagttgtgagatatttggctaccacatccccaagggtgctacactcttggtgaacatttgggccatagcccgagacccaaaagagtggaatgacccattggagtttaggcccgaaaggtttcttctaggtggtgagaaggccgatgttgatgttaggggcaatgactttgaggtgataccttttggtgctggacgaagaatttgtgctggacttagtcttgggcttcaaatggttcaacttctcactgcagccttggcccattcatttgattgggaactagaagattgcatgaacccagaaaagttgaacatggatgaagcgtatgggctaaccctacaacgggccgtgcctctttcagtgcaccctaggcccaggctcgcaccacatgtgtactcaatgtcttcctaatttttaagttctacattttggagtttttcttccttataattgttgtcttttcttttggttaacaaggatcctagtaacaataaaaacatacatggtgatatagtatgttagtgtgtgaagatccaaaaacatgaaaaggtgtcatttcatatgtttttggtagtgcctttaaaatttacttgtatatgtatatgaataattgaatatatgctatatggatgggattcaatgattagtttagcatgaaatttatttttgagaaatgctcgaaatatat

SEQ ID NO: 324 - DNA, 1162 bp, Glycine max
atgggaagggctccttgttgtgagaaagtgggattgaagaaggggaggtggacagcagaggaggatgagatcttggcaaaatacattcaggccaatggggaaggttcttggaggtcattgcctaaaaatgcaggattattaaggtgtgggaagagttgcaggctgagatggattaactatttgagagctgaccttaaaagaggaaacatttctgctgaagaggaaaataccattgttaagttgcacgcttcttttggtaacaggtggtctttgatagcaaatcacttaccaggaagaacagacaacgagataaaaaactactggaattctcacctcagcaggaaaatttacagtttcccaggtgcaggtgcaggtgcaagtgcagggatcatggatacacctaaggtagtatatattcctcccaagcgcaaatgtggtagaacaagtcgttgggccatgaagaaaaacaaaacatacacccaaaaaaacagtgacaccgcagttccgacgccaccaactccgtctctagagagtgagggtttgtcaaacgccgttaatgacttcaaggtcctggacggtgacgtggcagagtttgatgagccgagaacggaggagctggaggcggaggtaaataaacacatcttgggactgtgtgaactagagggcattaatgaggacagtgggatgttgttgggttttagtgacattttggaaagttgccttgcggaaacaacatgtggggtttgggacataagtgaagagagagaaagcaatgacgtggtggcggctgatgcttgtcgcgacaaaatagcatcgagtgaggaagggtcatgctcttccatgaatcaagactgggactgggagagcgtgttagagtttagtaacgctgttgataattgggaggaccaagacaaattgctcacttggctgtgggaggacgatgactgcaagagattgggagagacagatactcagatactacaaaacgacatggttattgattggtttctctcttgattcatccaagaataaaataggcttagtgtgtgtgcccccttggtcatgtttctttaatctgttcttcttggattgattagggaatgtgtaaacttaataaatactttttttagttacttatataatcatccttaagacacactag

SEQ ID NO: 325 - DNA, 810 bp, Glycine max
atgggaagagctccttgctgtgagaaggtggggttgaagaagggaagatggacagctgaagaggataagatcttgactgattacatccaagaaaatggtgagggatcatggaggtccttgcccaagaatgcaggtttgttaagatgtgggaaaagttgtagactgaggtggatcaactacttgagatcagatgtgaagagaggtaacatcactcctcaagaagaagagatcattgtcaagttgcatgctgttctgggtaacaggtggtctgtaatagcaggacatttaccaggtcgcacggacaatgaaataaagaactattggaattcccatttgaggagaaaaatttactgcttcatgaagtccttaaatgagtccctccctcccattgacatggctgctgtaaacgtagctgctaactccaagagaagaaccgttcaaccaacgctcaaaagaagtgcaacttcacaaagtttcattaatgatgaggagaacccaacagaatatagtttggatggttattgtgagaacacatatggcacaaccgcttcatgcctcagcagcatggatgaagttgaggccttgggaccttaccaatggttagatgatgaaatcatgaaacttactcacatctgttcgtcagtgaattctgtctatgactatcatcatcatcagtggcctgatatgcaattagaaggtagtgttgatcaatcctataatccttgggatttttgtgaagaaaaccagaacgaggctaattgcttttggggtactactggccataatgaaggaaatggcttttaccagtga

SEQ ID NO: 326 - DNA, 1221 bp, Oryza Sativa
gcgtgtgtttgctgagacgccattgtcacatcggttgctgcttccttctcggaagatagcaccaccagaggtcgtcgttgggttgtaatggcggaggtgcagagcgtgcaggcgctggcgtcgtcgctggcggcgctgccgccggagttcgtgcgttccgagcacgagcggccgggggcgaccacgttccgcggcggcgacgcgccggagatcccggtgatcgacatggcggcgcccgagtccgccgcgcgcgtggcggaggcggcggcggagtgggggctcttccaggtggtgaaccacggcgtgcccgccgcggcggtggcggagctgcagcgcgttgggcgcgagttcttcgcgctgccgcaggaggagaaggcgcggtacgccatggacgcgtcctccggcaagatggagggctacggcagcaagctgcagaaggacctcgagggcaagaaggcgtgggccgacttcttcttccacaacgtcgcgccgccggccatggtcaaccacgacatctggcccagccatccggctggctacagggaggcgaacgaggagtactgcaagcacatgcagcggctggcgcggaagctgttcgagcacctgtcgacggcgctgggactggatggcggcgccatgtgggaggcgttcggcggcgacgagctggtgttcctgcataagatcaacttctacccgccgtgcccggagccggagctaaccctcggcgtcgcgccgcacaccgacatgagcacgttcaccgtcctcgtccccaacgacgtccagggcctccaggtattcaaggatggccactggtacgacgtcaagtacgtccccgacgccctcatcatccacatcggcgaccagatcgagattctgagcaacgggaggtacaaggcggtgctgcatcggacgacggtggacaaggacaggacgcggatgtcgtggccggtgttcgtcgagccgccgccggagcacgtcgtcgggccgcacccgcagctcgtcaccgacgggagcccggccaagtacaaggccaagaagttcaaagattaccggcactgcaagatcaataagctccccatgtaaatttgtaattgggccatggaaacatcgcccccatgacacccaagtaccaagagtgctattgctggatgtggacgctgctcaatgtgatgctagttaagttgctctgattgctaatctgctgctttctgattcgtaatc

SEQ ID NO: 327 - DNA, 918 bp, Oryza Sativa
atttgcaactgcaaatttgtctatatacaaaatttgtctccacgttttcttggatagttagttgctcacccgatcctgtatccatggcggccgtgtcggaggtggaggtcgacggcgtcgtgttcccgccggtggcccgcccgccgggctccggccacgcccacttcctcgccggcgcaggtgtgaggggagtggagatcgccggcaacttcatcaagttcacggccatcggcgtgtacctggaggagggcgcggccgtgccggcgctggccaagaagtgggccggcaagtccgccgacgagctcgccgccgacgccgccttcttccgcgacgtcgtcaccggcgatttcgagaagttcacgagggtgacgatgatcctgccgctcaccggcgagcagtactcggacaaggtgacggagaactgcgtcgcggcgtggaaggccgccggcgtgtacacggacgccgagggcgcggccgcggacaagttcaaggaggccttcaagccccacagcttccctccgggcgcgtccatcctcttcacccactccccgcccggcgtcctcaccgtcgcgttctccaaggactcgtcggtgccagagggcgccgtggcggcggcggcgatcgagaacagggcgctctgcgaggcggtgctggattccatcatcggcgagcacggggtctcgccggcggcgaagcggagcatagcggcccgcgtctcgcagctcctgaaggcggaatccaccggcgacgtggcggcggcggagcccgcgccggtgtccgcgtgaaaatcgagctgcgaattaaccgcgcatctaagagctcctcctacacttcttgtacacttctactgccctcgtgtttgacaatgaaataaaaggaaaggagaaatcgcggctgttcttccgttccatctctgaa

SEQ ID NO: 328 - DNA, 1403 bp, Oryza Sativa
atggcgccggtggccacgacgttcctcccgacggcgtcgaacgaggcgacgctgcggccgtcgttcgtgcgcgacgaggacgagcgccccagggtggcgtacaaccagttcagcgacgcggtcccggtgatctcgctccaggggatcgacgaagcggcgcgggcggagatccgtgcccgcgtggccggcgcgtgcgaggagtggggcatcttccaggtggtggaccacggcgtggacgcggggctcgtcgccgacatggcgcgcctcgcccgcgacttcttcgcgctgccgccggaggacaagctccggttcgacatgtccggcggcaagaagggcggattcatcgtctccagccacctccagggtgaagcggtgaaagactggcgggagatcgtgacctacttctcgtacccggtgaagtcccgcgactactcgcggtggcccgacaagccggcggggtggcgcgcagtggtggagcagtacagcgagcggctcatgggcctcgcctgcaagctgctgggcgtgctctccgaggccatgggcctcgacaccaacgcgctggccgatgcctgcgtcgacatggaccagaaggttgtcgtcaacttctaccccaagtgcccccagcccgacctcacccttggcctcaagcgccacaccgaccccggtaccatcacgctcctcctccaggacctcgtcggcggcctccaggccacccgcgacgccggcaagacgtggatcaccgtccagcccatccccggctccttcgtcgtcaacctcggtgaccatgctcactatctgagcaatgggaggttcaagaacgcggatcaccaggcggtggtgaactccgactgctgccggctgtcgatcgcgacgttccagaacccggcgccggacgcgatggtgtacccgctggcggtgcgcgacggggaggagcccatactggaggagccgatcacgttcgcggagatgtaccggcgcaagatggcacgcgacctcgagctcgccaagctcaagaagaaggccaaggagcagcggcagctgcagcaggcggcgctgccgccgccgccgccgacgcaggtcgccgcggagttggcagcacagaagcccaagtctctcgacgagattcttgcctagatcgccatggacgcagcgcgatcgatgtgtggagtactgtggactagatataagtataactatgctgtctatgcatttgcagcacgaatgcttgaagactgaaataatgtgtatcttccgtcgaaaatcgaagcagtcgtaatactactaatatagtagtaaacgaagtaaggactctttacatgagaccttctttacattttcagagttgtcttttctctatatcggctaagtaatagctagggacagacctcccgcctccctttgtc

SEQ ID NO: 329 - DNA, 1882 bp, Oryza Sativa
taaacccgcatttcccatcgtacaacgagcgagcggatcatacggtcatggacgttgtgcctctcccgctgctgctcggctccctggccgtgtccgccgccgtgtggtaccttgtgtacttcctccgcggcggcagcggcggcgacgcggcgaggaagcggcggcctttgccacccgggccacgcgggtggcccgtgctgggcaacctgccgcagctcggcgacaagccgcaccacaccatgtgcgccctggcgcggcagtacggcccgctgttccggctccggttcggctgcgccgaggtggtggtggccgcgtcggcgcccgtggctgcgcagttcctgcgcgggcacgatgccaacttcagcaaccgcccgcccaactcgggcgccgagcacgtcgcgtacaactaccaggacctcgtcttcgcgccctacggtgctcgctggcgcgccctgcggaagctgtgcgcgctccacctcttctcggccaaggcgctcgacgacctccgagcagtccgggagggcgaggtcgcgctcatggtgaggaacctcgctcggcagcaggcggcgtcagtggcgctggggcaggaagcgaacgtctgcgccacgaacacgctggcccgcgccaccatcggtcaccgggtgttcgccgtcgacggcggggaaggcgcaagggagttcaaggagatggttgtggagctgatgcagctcgccggcgttttcaacgtcggggacttcgtgccggcgctccggtggctcgacccgcagggcgtcgtggcaaagatgaagaggctgcaccgtcggtacgacaacatgatgaacggattcatcaacgaaaggaaggccggggcgcagcccgacggggtcgccgctggcgagcacggcaacgaccttctaagcgtgctgctggcgaggatgcaggaggagcagaagctggacggcgacggcgaaaagatcaccgaaactgacatcaaagctctgctcctgaacctattcactgcggggacggatacgacatcgagcacggtggagtgggcactggcggagctgatccggcacccggacgtcctcaaggaggcccagcatgagcttgacaccgtcgtcggtaggggtcgtctcgtgtccgagtctgaccttccacgcctcccctacctcaccgcggtgatcaaggagacgtttcggcttcacccgtcaacgccgctctcactgcctcgggaggctgcagaggagtgtgaggtggacggctaccgtatccccaagggcgctaccctcctagtcaacgtctgggctatagcccgtgacccgacccaatggcccgacccgctacagtaccagccttctcggtttctccccggcaggatgcatgcagacgtggatgtcaagggtgctgatttcggcctgataccattcggagcaggacggagaatatgcgctggccttagttggggcttgcggatggtcacactgatgactgccacgctagtgcacgggttcgactggaccttggctaacggcgcgactccggacaagctcaacatggaggaggcctatgggctcaccttgcagagggccgtgccgttgatggtccagcccgtgccaaggctgcttccatcggcttatggagtataaaaccggtctacttactagtaccactttaaattaaggtcagaaatcggtggagactacttgcagtgttggccgcattatatgacgtattattttgttttgtttgttggtggaaaaataaagtagtctatctcagtgttatctggcactaaaggaactctagaaatggtggcaaaatagagtactatcgtggaatcataaaaaaggattatttggtgtataatacagaaaaatttatgaacacgctggtatatatg

SEQ ID NO: 330 - DNA, 1297 bp, Oryza Sativa
gcacgctgcatatatccgagagcccaagcgcgcgtcagggcaggcaggctccaccatttctcccagctcgacccgcgcacaccgccgcccggggaggaaaagcatggggagggcgccgtgctgcgagaaggtggggttgaggagggggaggtggacgaaggaggaggacgagaagctggcgaggtacatacgggagaacggggaaggggcgtggaggtcgatgcccaagaatgccggcctgctgcgctgcggcaagagctgcaggcttcggtggatcaactacctccgggccgacctcaagagggggaacatctcgccccaggaggaggacatcatcctcaacctccacgccacactcggcaacaggtggtccctgatcgccggccacttgcccgggcggacggacaatgagatcaagaactactggaactcgcacctgagccggaagggatacgagttcctccgcggcggcggcggcggcgccgtcgtcgacgtcgacctcagcaagttgcccggcggcgggaagcggcgcggcggccggacgggccgcagcagcagcgggaaggagaagacgaggacgaaggagaaggacaaggcccccgctccagaagctgcgcacaatgacgacggcggcggcggcggcggcggcggcattgacaacgtctcggcagctagccacagccacagggaggagcaggcacaggcgagcgccagtggtctcacatcagatgggctcgaggagggcccactgggcctaagcgaggagatggtgagtgggcccgtgggaccggtgagcccaaagcctgaggtgggccaggatgggtcttctgcagagagtggctgctgtgggcctagtggatccagtggcccaaccgaggctgtgggccaggacatgggcgacaagtccatggactgggacctggtgggcctggacgatggcttcgccaacgatgacatgtggggctcactctcctgggactacggggagttggtgggcccggatggagttcatcagggcgaggtgctatccgacttgttcttcttgggcaacctgtagccaagatgtgtaggtgaagtgacaaacgtgtttgggtttcaccatcttttgggcatgtttgatgggggccgtattgattttggggtagagaggttgatgcgtgtctagtgagaagaacgatactagttgagtacttgcgttagttcttttggtttaccggtcatgaagatttgtgtgcgtatgcatcaacatgagattaatgcatagaccgcacgctatgaatgtataattctagcatcc

SEQ ID NO: 331 - DNA, 1077 bp, Oryza Sativa
atggggagggcgccgtgctgcgagaaggttgggctgaagcgcgggaggtggacgacggaggaggacgagaagctcgccggctacattgccaagcacggcgagggatcctggcgctcgctgcccaagaatgcagggctgttgcggtgcggaaagagctgcaggctgcggtggatcaactacctgagagccggcgtgaagcgggggaacatctccaatcaggaagaggacgtcatcatcaagctccacgctaccctcgggaacagaaagtcttacgttgtgaaacggatggactacgtgtgtttgggcgcacgtgactactgcttccaacaaaacacacacgtacggtggtccctgatcgcgagccacctcccggggaggacggacaacgagatcaagaactactggaactcgcacctgagcaggcagatccacacgtaccggaggacgtacaccgcccccagcgaggccgccgtgaccatcgacgtgaccaagctccaggccgccgggaagcgccgcggcggccggaccgccgggcagtcgcggaagggcgacaagaagcgcgcggaggacgacccgcccaaggagaccgccgccgccgacacgccgttgccggagtcgagcccgcggcgcgcgcagagcgacgaggcgcggagcggcagcgtggtggtcgacccggaggagccgagcagccagcccaacaacggcagcagcggcggcggcggcggcacgccggacgggccgtgcagcgaggagacagccactgggccgacgtcgctggacccgatggagatgggcctctgggaggttgagagcgagttcgccgagatggaggcccttctgtgcggcggtgtggcgcccgacggccccgggataccggggctcgagccgctggacgtcgcggcccaggcggacgacctgctcgacatggactgggacggcttcgcggccgacctgtggggcgatccggcccagaggggcggccttgtccaagacgcgggcgagccaaacggctcgatgggctgcagctcggacgagctcgagtcgttcgcgagctggctcctctcggactcctgctga

SEQ ID NO: 332 - DNA, 1332 bp, Brassica napus
actgaattaattaataagaatagtatctttagccaagaacattttaattctcttagctagatttcatcttcccttctcacttctccttcttttatttctgatcacagtcatacaaacccaggtataacaattacactaagttaacctaaaaactcaagttttataatcagaggttcttcctttttttcttcatccaatccttgaatcttggagtgtttttcatttcatctcttgcttttctcccttgagatcgatcttagaacctagatagtagctagctatagtagatggagtccaaaaagattttatttgatctctctcagcttgtgtgtagtgtttgaccgtgtttggtttatctttaagctatagggttgatataaatggagggtggtgcgagtgatgaagtagcagagagcagcaagaagatagggagagggaagatagagataaagaggatagagaacaccacgaatcgccaagtcactttctgcaaaagacgcaatggtctgctcaagaaagcttatgagctctctgtcttgtgtgacgctgaggttgctcttgtcatcttctccactcgcggtcgtctctacgagtacgccaacaacagtgtaagaggaacgatcgaaaggtacaagaaagcttgctccgacgctgttaatcctccttccgtcaccgaagctaatactcaatactatcagcaagagtcatctaagctacggagacagatccgggacattcagaatctgaacagacacattcttggtgaatctctcggttccttgaacctcaaggaactcaagaacctcgaaggtaggcttgaaaaaggcatcggtcgtgtccgctccaagaagcatgagatgctagttgcagagatagagtacatgcaaaaaagggagatcgagcttcaaaacgataacatgtatctccgatccaagattaatgaaagagcgggaatgcagcagcaggaagcgagtgtgatacatcaacaagggacggtttacgagtcatcttctcatcagtcggagcagtacaaccggaactatattccggttaaccttcttgaaccaaatcagaactcctccgaccaaaaccaaccacctctccaacttgtttaagtaaagtctaatcaacaaaataagctccttatgcatttgtctattcatgttacaattatggttaaacaacttaaaataaagacgggtaacgatttgagagggacctaagttacatatgtaccttgattatttatatgtaatgtattgtgtacgttccagctagtaactttaagacaagagacttaactaaatttctagtttctaataaagctaatac

SEQ ID NO: 333 - DNA, 1202 bp, Brassica napus
atgagggaagtattagagaggcataatttgcagtcaaagaacttggagaagcttgatcagccatctcttgagttacagctggttgagaacagtgacaattcccggttgagcaaagaaattgcagacaagagccaccaactaaggcaaatgagaggagaggaacttcaaggacttaacatagaagagctgcaacagctggaaaaggcccttgaagctggtttgacgcgcgtgattgaaacaaagagtgagaagattatgagtgagatcagtgaccttcaaagaaagggaatgaaattgatggatgagaacaagcggctaaggcagcatggaacacaactaacagaagagaacgagcgactaggcaagcaaatatataataatatgcatgaaagatacggtggtgttgagtcggagaagaccgccgtgtacgaggaagggcagtcgtcagagtccattactaacgccggaaactccaccggcgctcctgttgactccgagagctccgatacctctcttaggctcgggtaattcattatttttcaccatatctcttaattttgtttttttcctgatttaataagttgacatgatttttgtttgtaaaaaataatattatctaaaaaagaagagaagagtatatggcctaaataatcacatgttaatcatttcttggtaaaatgataaaagaattgaaaataagttgacttagtttcgtgtatgttttaacaatgatcttgctattttatcttatggcccctattatatatgatatgcaacaacgagaaaaaaacatgatatgcaacattgttttttttaaatccaacgtgaaaaatagaccactaatttacgtttgttttgcaaatgttagtatgaaaataaatatataatttaatgtttggtttcttgcagcttaccgtatggcggttagagatggaaccatacaaagaagttcatggagtgaggagatgctctgtagtaacaagtggcaatgtagtaatttctcttgtttgatgtaagtttttgtctgaggaagaggttttccttttatgttctctttgatattattatctttcttcactgcatttctgtgttatcatcatcaacatacggtatgtttatgcggtattgaccaatctgatactctaacgtggctgtcgaccccgtagtatatctcttggtacataccttaataagatcttttc

SEQ ID NO: 334 - DNA, 540 bp, Brassica napus
atggagaatatgggaagtagagtgatagaaccattgatagtgggaagagtggtaggagaggttcttgattttttcactcaaacaattgaaatgaacgtgagttacaacaagaagcaagtctgcaatggccatgagcttttcccttcctttgtctcctcaaagcctagggttgagatccatggcggtgatctcagatctttcttcaccttggtgatgatagaccctgatgttccaggtcctagcgacccctttttaaaagaacacctgcattggattgtgacaaacatccccggtacaacagatgctacatttggaaaagaggtggtgagctatgagttcccaaggccaaatatagggatacacaggttcgtgtttgttctcttcaagcagaagcaaagacatgttatcgatatctccccaaacattccttcgagagataagttcaatactcgcaaatttgcgatcgagcatgatcttggtctccctgtcgcggctgtcttcttcaacgcacagagagaaaccgcagctcgcagacgttaa

SEQ ID NO: 335 - DNA, 1328 bp, Brassica napus
caaaaatagaatgaaataaaaggaaaaaaggaaaaaagaaaacataaaacgctcagtatctccggctagtggaaaccggacctcaagatcaaattagggcgcaaagccctgttggagacagaagccatggggagaaagaaacttgaaatcaagccaattgagaacaaaagtagccgacaagttaccttctccaaacgacgcaacggtctcatcgagaaagctcgtcagctttccgttctctgtgacgcatccgtcgctcttcttgtcgtctccgcctccggaaaactctacagcttctcctccggtgttaacctggtcaagatccttgatcgatatggaaagcaacatggtgatgatcttaaagccttggatcgtcagtcaaaagctttggactgtggttcacaccatgagctactggaacttgtggaaagcaagcttgaggaatcaaatgtcgataatgtaagtgtgggttccctggttcagctggaggaacaccttgagaacgccctctccgtaacaagagctaggaagacagaactaatgttgaagcttgtcgagaaccttaaagaaaaggagaagttgctggaagaggagaaccatgttttggctagccagatggagaagagtaatcttgtgcgagccgaagctgattatatggaggtgtcacctggacaaatctccgacatcaatcttccggtaacgctcccactgcttaattagttacctttaatcggcgaataaataaaatccaaaacatataattaaaacaaacaagatgtgtaattatccccttgtaaagggtgtacgttgtataatcttaatactctccgtctcgggaggcttcgggtgtaaaactatttcagatttatgcagcgtgggacagttcttccggtggctgtggaattggaggcattttctcaggaaataacctaaagcgcataccaaacctgagcgagcctcgctcccatgtatcttcagctcttatggcagaggccatagctgttcgcctcgcggttgttacatccgtctattcaaacgtccgatccctggccgttctaaccgattcgctctccctcgtctctctaccgaagaaggaagccactcaacctgaactgttcggtatcatgtttgatatctatcatgctttgtcgtactttgatcggatttcttttcactttatctctaggacctttaatggcgaggctgacttggtggcaaagtctgctctcactctgctttctgtaaactcctctgttggaggataacacttttatgtttgaatgaatgaatgcattgttgtttgaccaaaaaaactaaaaaaaaaaaaa

SEQ ID NO: 336 - DNA, 932 bp, Brassica napus
agaaaaaggagagacacaaaaagaaagaaataaaagcaaaaaagaaagaaaataaaagcaaaaataagaaagaacaaaaaacgctcagtatctccggcgagagttgaaaccgaatctcaggatcaaattagggcacaaaggcttctcggagacagaagccatgggaagaaagaaactagagatcaagcgaattgagaacaaaagtagccgacaagtcaccttctccaaacgacgcaatggtctcatcgagaaagctcgtcagctttcagttctctgcgatgcatccgtcgctcttctcgttgtctcagcctccggcaagctttacaacttctccgccggcgataacctggtcaagatccttgatcgatatggaaaacaacatgctgatgatcttaaagctctggatcttcagtcaaaagctccgaagtatggttcacaccatgagctactagagcttgtcgaaagtaagcttgtggaatcaaattctgatgtaagcgtcgactccctcgttcagctggaggaccaccttgagactgccctctccgtaactagagctaggaagacagaactaatgttgaagcttgttgatagcctcaaagaaaaggagaaattgctgaaagaagagaaccagggtttggctagccagatggagaagaataatcttgcgggagccgaagctgataaaatggagatgtcacctggacaaatctctgacatcaatcgtccggtaactctccgactgctttattagccaccttaagtccaaaacttgtgactaaaaacaaaaataagttatcgaactattcccctataagggtgaacgttgtatatcttcattctctctggctgagagaccccgtgtgtaaaactatggttagatttaagtaaaaatatatatttaagacatactaattatggatctttgtaccttc

SEQ ID NO: 337 - DNA, 1061 bp, Brassica napus
gaaataaaaggaaaaaaaaagaaaagaagcataaaacgctttagtatctccggccacttgaaccgaacctctggatcaaattagggcacagagaccacttggagacagaaaccatgggaagaaaaaaactagaaatcaagcgaattgagaacaaaagtagccgacaagtcaccttctccaaacgacgcagcggtctcattgagaaagctcgtcagctttctgttctctgcgatgcatccgtcgcgcttctcgttgtctcctcctccggcaagctctacagcttctccgccggtgataacctggtcaggatccttgatcgatatggaaaacagcatgctggtgatcttaaagccctgaatcttcagtcaaaagctctgagctatggttcacacaatgagttacttgaacttgtggatagcaagcttgtggaatcaaatgtcggtggtgtaagcgtggacaccctcgttcagctggagggtgtccttgaaaatgccctctctctaactagagctaggaagacagaactaatgttgaagcttgttgatagcctcaaagaaaaggagaagctgctgaaagaagagaatcaggctttggctggccagaaggagaagaagaatcttgcgggagccgaagctgataatatggagatgtcacctggacaaatctccgacatcaatcttccggtaactctcccactgcttaattagccaccgttagacggggctgatcaaattaaaaaatccaaaacatacaactaaataaataagctttgttgtttttcacccttgaagggttctcgttgtatatctcaatactcccttggctgagagattgtgtgtttactcctatgttagatataatgagtaaaataaaaataaaaagatctttgtaccttcgtcgagagagaattgtagcgagtgtgcttgtgtgttcttcttctcttctttgcttcatggcgaagaagcctaccgtctaatttgtaacggagacgtggccctctctgcccttttgtattcgtagttcctttgtatttatccacaacgcatagaggttgtcatggt

SEQ ID NO: 338 - DNA, 899 bp, Brassica napus
gacacaaaaagaaagaaataaaagcaaaaaagagagaaaataaaagcaaaaataagaaagaacaaaaaacgctcagtatctccggcgagagctgaaccgaaccgaacctcaggatcaaattagggcacaaagggttctcggagacagaagccatgggaagaaagaaactagagatcaagcgaattgagaacaaaagtagccgacaagtcaccttctccaaacgacgcaatggtctcatcgagaaagctcgtcagctttcagttctctgcgatgcatccgtcgctctcctcgttgtctcagcctctggcaagctatacaacttctccgccggcgatgacctggtcaagatcgttgatcgatatggaaaacaacatgctgatgatcgtaaagctctggatcttcagtcagaagctccgaagtatggttcacaccatgagctactagagcttgtcgaaagtaagcttgtggaatcaaattctgatgtaagcgtcgattccctcgttcagctggagaaccaccttgagactgccctctccgtaactagagctaggaagacagaactattgttgaagcttgttgatagcctcaaagaaaaggagaaattgctgaaagaagagaaccagggtttggctagccagatggagaagaataatcttgcgggagccgaagctgataaaatggaagtgtcacctggacagatctctgacatcaattgtccggtaactctcccactgctttattagccccttaagtccaaaacttgtgactaaaaacaaaaataagttaccgaactattcccctataagggtgagcgttgtatatcttcacactctcttggctgagagaccctgtgtgtaaaaactacggtttgatttgagtaaaaatatatatttaagaaa

SEQ ID NO: 339 - DNA, 955 bp, Brassica napus
aaaaaggaagaaaaagaagaaagaataaaacgcttagtctctccggcgactttaaccgtacctcagaatcaaattagggcacagagacctctcggagacagaagctatgggaagaaaaaaactagaaatcaagcgaatcgagaaaaacagtagcagacaagtcaccttctgcaaacgacgcaacggtctcatcgagaaagctcgtcagctttctgttctctgcgaggcatctgttgggcttctcgttgtctccgcctccgacaaactctacagcttctcctccggggatagactggagaagatccttgatcgatatgggaaaaaacatgctgatgatctcaatgccctggatcttcagtcaaaatctctgaactatagttcacaccatgagctactagaacttgtggaaagcaagcttgtggaatcaattgatgatgtaagcgtggattccctcgttgagctagaagatcaccttgagactgccctctctgtaactagagctcggaaggcagaactaatgttaaagcttgttgaaagtctcaaagaaaaggagaatctgctgaaagaagagaaccaggttttggctagtcagattgagaagaaaaatcttgagggagccgaagctgataatatagagatgtcatctggacaaatctccgacatcaatcttcctgtaactctcccgctgcttaattaaccacctttactcggcggttaatcaaaataagaaacatataatctaaagataacctatgtaggttttacttttcgcagcttaattaaccacctttactcggcggttaatcgaaattaaaaacatataattaacaaataacctatgtcagtttaaccccctgataaagatgcacgttgtacatcttagttctctctctggctgaggggctgtgtaataactatgcttagattaaataaaaatatatatctatttaagaca

SEQ ID NO: 340 - DNA, 1421 bp, Brassica napus
atgtcgaacaacatagtggtgctagacaacggcggtggtctcatcaaagccggccaaggcggcgagcgtgaccccctcgtcgtcatcccaaactgcctcttcaagcctctctcctccaagaaattcatctatcctcctcctctctccgacctcgacgtcgacatcgacctcacctccgccgccgtccggcgccccatcgaccgaggctacctcataaaccccgacctgcaacgcgacatctggtcacacctcttcagctcactcctccgcatcaccccaacctcctcctccctcctcctcaccgagccgccactctccatcccttccgtccaacgcgccaccgacgagctggtgttcgaggatttcggcttctcgtccctctacctggctaatcctcagtcactcgtccatctctacgaggctagtcgccagccagggtccatcctctcgcggactcagtgtagcctcgtcgtggattgtggcttctccttcactcacgccgtccccgtcctccacaacttcacgctcaactacgccgtcaagaggatcgatctcggaggcaaagctttcactaattacttgaaggagttggtgtcttatcgatccataaatgtgatggatcagactttcttgatggatgatgctaaagagaagctctgcttcgtctctcttgacctccaccgtgatctcaaccttgctcgggagcggcgtactgggaacgtgctaaagtctacgtatgttcttcctgatggtgtcacacataccaaaggttatgtcaaagatcctcaatctgccaaaagcttccttactttagggttatcagatggaggagctaacactgtcatggataaggttgacgttgagaagaagaaggctgacatgaacaaaaacgagattgacttgacaaatgagcgttttcttgtacctgagacgttattccagcctgcagatctagggatgaatcaggcgggaattgcagagtgcattgtccgagctgttagctcatgccattcttacttgcaacctgttttgtaccaaagcatcatcttaactggtggaagcactttatttcctcaacttaaggagaggcttgaaagagagcttcgaccacttgtcccagaccactttgatgtcaagataacaactcaggaggaccccatactaggtgtatggagagggggttcccttttggcttcgagcccagattttgagtccatgtgtgtcaccaaggctgaatacgaagaacttggatcagctcgatgtcggagaagattctttcactgaagacaaaccaaaaaacataatgcagtagttttcaaattgagttgcttgtatcatctcctctcacatgtctaatttattatcgtattgcaattgaatgttgccatgagaaacataatgaagtaacgaccaaacagcca

SEQ ID NO: 341 - DNA, 1543 bp, Brassica napus
atggaacatcaaggttggaattttgaggagaattgcaacttatccaacaataggagatcatctttaaggccacaagatgaactagtagagttgttatggcgagatgggcaagtggttctacagagccaaactaacagagagcaaacccaagcccaaactgtgaaacatgatcatcatcaagaaaccctaagatcccaaacatttcttgacgatcaagaaaccgtctcttggctacaataccctccatatgaagaccaattcataaccgacggcttctcatctcatttcttctcaaccggtaatcccctggagagaccagccccagagacggttaagcacgaggccggtcctgaccctccagatcaggccatgcctcctcctaagtttaggttaacgaattcatcatcaagtgtcaaagaactaggaaaggaacaatactcggtggtgaccgttggaccgagccattgcggaagcagccaatctcataacaatcttgatgtctcaatgcgtcatgatcggagcaaaactgtcaatgaaaggctttaccataacgcaggttcatcatcaggtggctcctctggttgcagctttggcaagaacatcaaagaaatggctggcgtacaaagcattacaacagaccgtaagagaaaacatataatagacactgatggatatgtgtctcagtcagatgtaataggtaacaaatcgaaccaaccatcaggatcaacgcgcaggagtcgagcagctgaagttcataatctctccgaaaggaggagaagagataggatcaatgagagaatgaagactttgcaagaactaatacctcactgcactaaaactgataaagcatcaatattggacgaagccatagattacatgaagtcacttaagttacaacttcaagttatgtggatggggaatggaatggttgctgctgcgacagctccgatgatgctccctggcgtacaacctcagccgttcatccgccagatgcagagcccggtacagttgcctcgatttccggttatgaacaatcccggtatattttgtcaaaatccgacacaaaaccaagttttctccaattggtttgatagatacattggcgtattcccacagatgcaggccgcgcctcagccgatggcgatgctgagatttggttctcaggcgggacagcaaagtcaacaaccgtctgcgccgacgaagaccaccgacggttctcgttagagctacaaaactgacgttgcacttttcttttcttcttggtttatttatatagatcgtaaaaatgaagcaataagaaacaagatggtggtttaaggtctcaagacaatggagatatcactacaagggacaaacatgcatggttggttaaggtctcaagacaatggagatgccactacaagggacaagcatgcatggtgggttaaggtctcaaaacaatgggttattagtttatcatatctcatctaccatttaccatacttgtaaccactatatatatgagatgttctcataagcaaatcaatcaagtgaataagattat

SEQ ID NO: 342 - DNA, 1376 bp, Glycine max
acgctcatcctctctctctttccttcattggtggctttcaacccaaagctgaaatcatctaaacatggcaaaccaaaccgaaccaaaaaccaacattcctaatatcaacgccttcccccaataaggaaagtaaaaatcaacaagtacatccttactcagctctctctttcaacaacatcccaccacacactaacaccaactccaactccaactccaagtcttcccctaactaacaccactaacaacaatcactaaaaaaagaaagaaaatttaccctgatcgcaggatctccgaacaaagctttgatttcacaaaagctaaatttagataaacacctgcatattaaatttttctgctctatacatgcatcacatgtccctcacactaaacaaaagaaaaacaccaccaccctttgcttttgcttttctataagtagtcaacggctcagccttaatttctttgctttttttaggttaaggtacatggtgagggagaagattcagattaagaagatcgacaacgccacggcgaggcaggtcacgttctccaagcgtcgcagagggctcttcaagaaagctgaggagctttcggttatgtgtgatgctgatgttgccctcataatcttctcttccactgggaagctctttgagtactcaagctcaagcatgaaggaaatacttgaaaggcatcatttgcactcaaagaacctagcaaggatggaacaaccatctctcgagttgcagctagttgaaaacagcaattgctctagattgagcaaggaagtggctgaaaagagccatcaactaaggcagctgagaggagaggatcttcaaggcttaaacatagaagaattgcaacaattggagaggtctcttgaaactggattgggccgtgtaatagaaaagaagggtgagaagattatgagtgagatcactgatctccaaagaaaggggatgctattgatggaagagaacgagcgacttaaacgtcacgtggcgggcataattaatggccaaaggcatggtggtgccgaatctgagaactttgttatggatgaaggtcagtcttcagagtctgttacgtacgtttgcaattccactggacccccccaagactttgaaagctcagatacttccctcaaattggggctaccatactccggctgatgagaaagtgtgtggggcgataaaattaacccaggcaaaaattcacaagattatgatataattttcattaatgattatgtctctggtatgtccccttggtgtgtagagttagtattatatattagtaaattgtaaggacttatgttatggggtactctaatgtcattcggaattaattgtttttaaaattaaaagaaacaaattcctagt

SEQ ID NO: 343 - DNA, 995 bp, Glycine max
catatgcgatgtatagtatacataattgtagaaccccaaacacaaacatcatagtatatagtatctatctaaagtaaataatcatggcacgggagaaccctcttgttattggtggtgtgattggggatgttctcaacccttttacaagctccgtttctttgactgtttcaatcaataatagggcgattagcaatggcttggaactcaggccctctcaagttgttaatcgccctagggttactgttggtggtgaagacctaaggaccttctacactctggttatggtggatgcagatgcacctagccctagcaaccctgtcttgagggaataccttcactggatggtgacagatattccagctaccacaaatgcaagctttgggagagaggttgtgttttatgagagcccgaacccttcagtagggattcatcgaatcgtgttcgtattgttccagcaattgggcagagacactgtcatcaccccagaatggcgccataatttcaattccagaaactttgctgaaattaataaccttgcacctgttgcagcagcttatgccaactgccaaagagagcgtggttgcggtggaaggagatattaacaagttcaattaatgaagattcttggatgccttactccagcttatactttagagaaataaagacagaagagagaaaaatatatatagtaccttaagtaatatgatgtaataaaaggaaagataaataatgataataataataatgataataataataatagatgcttagtgtaatagaatagtagcactatcatcaaataagttagaagagtaatggagaaaaagaataagttagaagttaataaaatctctccttttttaaataataatttagagagaaggtaccatcttgcaatgctagagcatgccattcaggaacttcttcaacagattatggtagcaacggaaaaaaaaatacaaaaagttcatgcatggttcatacatactacaggg

SEQ ID NO: 344 - DNA, 513 bp, Glycine max
atgcctttagagcctctaatagtggggagagtcataggagaagttcttgattctttcaccacaagcacaaaaatgactgtgagttacaacaagaagcaagtttacaatggccatgagctcttcccttccactgtcaacaccaagcccaaggttgagattgagggtggtgatatgaggtccttctttacactgatcatgactgaccctgatgttcctggccctagtgacccttatctgagagagcacttgcactggatagtgacagatattccaggcacaacagatgccacatttgggaaagagttggtgagctatgaggtcccaaagcctaatattggaatccataggtttgtgtttgtcctgttcaagcaaaagcgtagacagtgtgttactccacccacttcaagggaccacttcaacacacgcaaattcgcagcagagaacgaccttggcctccctgtggctgctgtctacttcaatgcacagagggaaacggctgcaagaagacgctag

SEQ ID NO: 345 - DNA, 898 bp, Glycine max
atagaaggtgggacaaagagagaaaaccgaatagaaaagaaggtagctagctagggttttggcgcgaagaagaatggggaagaagaagctggagataaagcgaatcgagaacaaaagcaatcggcagataacattctccaagaggcgcaaaggattgatgaagaaagcccgcgagttatccattctctgcgatgcgaagttggcgctgctcatcttctccagcaccggcaagctctacgagctttgcaacggtgacagtttggccgaggtcgtgcagcgatattgggataacttaggagcgagcggtactgacacaaagggactccgctttgaaattgcagatatctggtctgatgaagcgttttctcaattggtccaaagccactttggtgtttctgaacttgagcatctgagtgtgactgaccttatggaactagagaaactggttcattctgctctttcgcgaatcagatcagcaaagatgcgattgatgatggaatctgtagagaatcttaagaaaaaggaacatatcttgagaaatgaaaatgagcttttggagaaacagattgaggcacagaaaaaagctgatgacgtcaataacgtggtgacacggtttattgactatgatcaaacagatcgggtgacgcataatctgctccctggtttgtaaatgcagctgaaagccaccactatggatataacttgcacgaattttccaattgtgtgcttaatacatgcatagggaactatgccatggtttagctacttgccttctgttatttctattctggttgaaacatggaccatctagagaagctcttaaacataatgttgccgtggggaagtttgcttcagctactagtctgtgcctaattaaattagtgacatattatatacc

SEQ ID NO: 346 - DNA, 1143 bp, Glycine max
agaaaatagcttgaaaaaaatatatattctataaacaattatgctttttccatctggtattctgaaaaagcaagtttaatttatttgtggaaagagatataaagcaagtattaaacacatgggtaggggaaaggtggagctgaagaggattgagaacaagataaaccgtcaagtgacatttgcaaagaggaggaatggtttgctcaagaaggcttatgaactctctgtcctctgtgatgctgaggttgccctcattatcttctccaaccgtggcaagctctatgagttctgcagtggccatagcacggccaagacacttgaacggtatcacagatgcagttatggagccttggaagtccagcaccaacctgaaatagagacacagaggcgctaccaagagtacctaaagctaaaatccagagttgaggcactacagcaaacacaaagaaacctccttggggaagaattggagcacttagacgttaacgaccttgagcagcttgaacgtcagctggactcttccttgaagcaaatcaggtctaacaagacacagcagatgcttgatcaactctctgatttgcatagaaaggaagagatgctactggaaactaacaatatcctgagaaacaagttggaggaaatcaatgtagccctacaaccaacatgggaagctagggagcaaaatgctccctacaattgccaccctccccaaacagagggatattatgagacagcaacagcacattgcagcagtacattgagaattggctatgattcttcaggattaaatgaagcaggaggagctgcaggagcctcagcccaaaatgctagtgaattcatgcatggatggatgaactaaatttatttccaatttagtacttaaattcatgatcatcagaaaaatgatgcttttgtagagatcttggcctacaagaacaggctctaataataggtgtcatgcagcataaaatatacttatgctattcttaatattccaataagacatgttttgaagaattttataattagcatcttcccaaactcaatccatcctcattgatccaaatggggttgtttgatacttaatgacatgtgtatgctcctatataagtgccattggttaattagtttttgctttgcttg

SEQ ID NO: 347 - DNA, 1282 bp, Glycine max
aagatggttttgctctcacattcatacaaataataatttaacaaatcataatatataatattccccttttattattattattgtaaggtcttgacaccatctctcgtggctatataaatatatatgcgtgtacaagacatacacgcagcgagcgagccacgaaaatattcatcacacagggttttggtttattattccaatttttggttttcccttttgttggatattagagtgtgtaagaaagagaagagagagaaatgggaaggggaagagtggagttgaagagaattgagaacaagatcaacaggcaagtgacctttgcaaaacgaaggaacgggcttttgaagaaagcttacgagctttccgttctttgtgatgccgaggttgctctcatcatcttctccaatagaggaaaactgtacgagttctgcagcagttcaagcatgctcaaaacgctagagaggtaccagaaatgtaactatggtgcgcctgaggctaatgtgtctacacgggaagccttggagttaagcagtcaacaggagtacttgaagctgaaggcacgttatgaggccctacaacggtcccagaggaaccttatgggagaagatcttggtcctttaagcagcaaagagctcgagtctcttgaaaggcagctagattcgtccttgaagcaaataagatcaaccaggacccagttcatgttggatcagctctctgatcttcaacgtaaggaacacttgctaagtgaggctaacaggtctctcagacaaaggcagttggaagggtatcaaataaatccactccaactgaatcccggagttgaagagatgggatatggcaggcatccagctcaaactcatggtgaagccctctttcaacaaatggagtgtgagccaacgttacaaattgggtatcagcctgatccagtatcagtggtgacagcaggcccaagcatgagcaattacatggcaggatggttaccatagtttgcgtttcctgcataagatccactgcaccagcacatttgccgttccaattttatttgaaaacgaaaaaaaaagaaggaagaaaatggctttggatgtaatgaagctgtaagtgtctgccgtgtatgaagtaggaacaaagttaagcagtgttgtttgtgtgtgctagctctttcataaaactgcacttctttgcttcggttactgtttcttcccttttaataagagtattgatagacaaattataaacatctacctattttttcatccattccattttttatcttatttctttc

SEQ ID NO: 348 - DNA, 1162 bp, Glycine max
tacacgcagtagcgagcggaccacgaaaatattcacagggtttggtttattccaatttttatttttagtttttccctttattggacattagagtgtgtaagagagagagagagaaatgggaagaggaagagtggagttgaagagaattgagaacaagatcaacaggcaagtgacctttgcaaaacgaaggaacgggcttttgaagaaagcttacgagctttccgttctttgtgatgccgaggttgctctcatcatcttctccaatagaggaaaactgtacgagttctgcagcagttcaagcatgctcaaaacgctagagaggtaccagaaatgtaactatggtgcgcctgaggctaatgtgtctacacgggaagccttggagttaagcagtcaacaggagtacttgaagctgaaggcacgttatgagtccctacaacggtcccagaggaaccttatgggagaagatcttggccctttaagcagcaaagagctggagtctcttgaaaggcagctagattcgtccttgaagcaaataagatcaacaaggacccagttcatgctggatcagctctctgatcttcaacgcaaggagcacttgctaagtgaggctaacaggtctctcagacaaaggttggaagggtatcaaataaatccactccaactgaatcccggagttgaagagatgggatatggcaggaatccagctcaaactcatggtgaagccctctttcaacaaatggagtgtgagccaacgttacaaattgggtatcagcctgatccagtatcagtggtgacagcaggcccaagcatgagcaattacatggcaggatggctaccatagtgggcgtttcctgcataagatccactgcaccacatttgccgttccaattttatttgaaaacgaaaaaaaaaacaacaaaaaagaaggaagaaaatggctttggatgtaatgaagctgtaagtgtctagtctaccgtgtatgaagtaggaacaaagttaagcagtgttgtttgtgtgtgctctttcataaaactgcacttctttgcttcggttactgtttcttcccttttaataagggtattgatagacaaattataaacatctaccttttttttcttctttccattctatttttatctaatttatcttctctttctttttt

SEQ ID NO: 349 - DNA, 1080 bp, Glycine max
tgtgcctcgcttcttcttgaatccatgcgcatgagtttgaagaattgtgttagcggtgaggtgagatatttcaatatttgataattgatagtatatatatggggaggggaagagtggatttgaagaggatcgagaacaagatcaataggcaagtgactttctccaagagaaggtctggcttgcttaagaaagcgcgcgagatttctgtgctgtgcgatgctgatgtggctctcatcgtcttctccactaaaggcaagcttttcgactactccaacgaaccttgtatgaaaagaattcttgaacggtatgagaggtattcgtatgcggagagacaacttgctggagatgatcaagcaccaaatgaaaactgggttatagaacacgaaaagctcaaggctagggtggaggtactacagcgaaatcaaaggaattttatgggagaagatctggacagcttaaatcttagaggacttcagagtttggaacaacaacttgattctgctctcaaactcattagatcacgaaagaaccaagccatgaatgaatctatttctgcgcttcagaaaaaggataagtcactccgggaacacaacaacttgctctccaagaagataaaggataaagagaaggagctggccccacaagagcaagatggactgcaaaataacatggatgtgacctctgtccttgtaactcaaccaccggagtccctgacaattggaggcttcccagaagccaaatgtaatgaagaaactccaacgtcgagtcgacctaaaaccattcttcccccttggatgcctcttcctacaaatgaatagaaagcctgttaactcttgttaaatacgaataccacttgtacaaagactagctatatacatcatcaggggcatttgatggtgactataccacctggattgtaatctctgtgtgacgtttctgactgcattttaatgcagctgcaaggtatattaaatgtactacatataaatataaatgatactgatataaaattgagtttgaataagggttcaggttttgacttatatccaaatgtataattcatgatttgtgctctctttc

SEQ ID NO: 350 - DNA, 1860 bp, Glycine max
ggagcggtgcaacaacacgactgatttaattggttgagcaagatgtcgacctcgacgaacgtggtagtcctggacaacggcggcgggctgatcaaggcgggcatcggcggcgagcgcgacccctccgccatagtcccgaactgcctctaccgccccccgtcgtcgaagaagtggctccacctccactccggcgacgaggacctcacctccgccgccgtgcgccgccccatggaccgcggctacctcataaaccccgacctccagcgcgaaatctggtcccacctcttctcttccgtcctccacataaacccttcccagtcctcgctcctcctcacggagcctctcttcactcccccctccatccagcgctcggtggacgagctcgtcttcgaggacttcaacttccgggccctgtacgtggcccactccccctccctcgtccacctccacgaggccagccgcaacaacgccaacgggctcctctccaaggcccagtgcagcctcgtcctcgacgccgggttctccttcacccacgcctcccccgtcttccacaacttcgccctcaactacgccgtcaagaggatcgacctcggcggcaaggccctcaccaactacctcaaggagctcgtctccttccgctccgttaatgtcatggaagagaccttcatcatcgacgacgtcaaggagaaactctgctttgtctcactcgacgtcaaccgcgacctcaccatcgccaggaagagtgggaaagagaatctgttcaggtgcacctacgtgcttccggatggtgtcacgtacacaaaggggtttgttaagtatccagatcaggcgcagcgatatcttgcattgagggagggtggccttcattcttcatcaccagtgcaagcgcaggaggatgtgaatttcacggaaattgccgagcacccagagaacaggaagagagttgatttgacaaaaaatgaatttgacttgacaaatgaacggtttcttgtgccagagatgatcttccgtcctgctgatttgggaatgaaccaggctgggctagcagaatgcattgtacgtgctgttaatgcgtgccatccacatctccgccctgttctctatgaaagcatcattttaactggtggaagcaccttatttcctcagtttgccgagagactagagaaggagcttcggcctctagttcctgatgactatcgtgtgaagataacgactcaagaagatcccatactaggtgtttggcgtggaggttcactgttggcatcaagtccggattttgaagctatgtgtgtgaccaagtctgagtatgaggagcttggttctgctagatgtcgcaagagattctttcattaaatgtgcatgctatcaacatatctaccctaatattgtatgtaaccctgatctgtagtatgtagttgatgagattcataaagatgtcacttttttttatctctttcattttccaattcctacatcttcctcgcaagcaaatgccacattggagagaagatcagaagaccatggactgctagtgcaggaagtgtgtaaatggagaatattgattgaacccactgtacgtcattgcactgttcagcgaatgttctgtcctcatctttccaacggattcttacacgggaccaaggtttgaaatgtggatgatcatctctgtaaaaaatttattcaggctacagttttcaggtgaatatgatatgatgcaggcatactggtaatattggatcaaaatccataggattatgacttcacttttcttctgcaacaagtgtggccttcttttgaggtgctatctagtgtggtatggggaacatttagatattaatataccaatcaagaaaaaatttc

SEQ ID NO: 351 - DNA, 1774 bp, Glycine max
acacttgtggagagagagagaacaaacaaggagcttctgtttcttgcttctagcaaccttcttatttcaacttcaacaaagtcagaaaaatctatcagcctttgcacttagctcagaaaactgatttggtttagccatgaacaacagtgttcctgattggaattttgggagtgattcctgtgtcacctccaccaatcaaaagaagcccatgatgggggtggaccaagagcttgtggagcttctgtggcaaaatggccaggtagtgcacagccaaactcatagaaaaccggttgtgaactcaagtaacttgattcaagatgatgagacagtctcatggatccaataccctcttgaggatccattggaacaagaattctgttcaaaccttttgtctgaactggcaccttgtgaagttgagtcctataagcaaatcaagccatttgaagagggaaaatttaccaaattggatgcttctagtgcccctcatgtgactgtaagttcacaattacctaccatgaaatcctcctcttttcaggatttctcaggaattcctataccggccccaagattccatgtttctgattcacctcagaaaaacaataatcacttgggtggatcatgtaaggtccaaaacttctctcacttttcagcaccccttaatgtttcttcagcatcggctaacgtgcattttggagacaaaattactggtaacatgtcaagaaatgagattagggagtgctcattgatgacagttggatcaagttactgtggtagcaatcacatcccccaagatccagatgctagcagggcatcaagcaatggtgtttggactactactttatcagtcgagccagaagctaaggagaaagggaaatcagagatgcttgaaccagctgtgacttcatcatctggtggctcaggtagtagtcttggaaaaacttgttcattatctacgagaaaccagggccaaaaaagaaaaggaatagacgtggaagaatctgaggagcaaagtgaggacacagaacttaaatcagcacttggaaacaagtcatctcaacgcacagggtcggctcgaaggaaccgtgctgctgaagtgcataatctatcggaaaggagaaggagagacaggatcaatgagaagatgaaggcattgcaacaactcatacctcacagtagcaagacagacaaagcatcgatgttggaagaggcaattgaatacttgaaatcacttcagctacaacttcagctaatgtggatgggatctggcatggcaccaataatgtttccaggaattcagcactacatgtcacaaatgggcatgggaatggctagaccgcctttccctcctcctattcataatccgatgcaattaccgagagtgccgcttgataagtctgtatctgcatctcagacaccaaaccagacattaatgtgccaaaatcccattttgggtgcatttaattaccaaaatcagatgcaaaatccagctctttcggagcaatatgtgcgttacatgggctatcatcttatgcaaaatgcctctcagccaatgaatgtattcagatatggtccccagggagtacaacatagtcaaacaatgattacacccagcagcaacagcagtggaaacatgagtggagcagcaaatattgatgaggctgtgagtggcaaaatgggttaattagtttagaagcacgcttttgaatacctatggcgtaaccaacaagataattgcaagatgatagaagcccttataaggcttgtatgctttcac

SEQ ID NO: 352 - DNA, 1460 bp, Oryza Sativa
ctacccctgctgcagtgctataggctagccctacctccctgctcctgtttcctctctttctctctcgcctccttcgcttcgcttccattggtggtggtctccattgctcccttcctccctgcctttttcttccataagtagtagtagtagcgggagtggccgccgccgcagccatagatctgcggcgccgcgtatctcgcggctggtttggctggtgcggttagcggctagggttttggttgtttcgtctgatcgatcctccccgattttgcggcggcggtggtgaattggtgtgtgatctgatatggctggcggcggcggtggcgggggaaggggggagggggaggggagggcggcgacggggaagagggagaggatagcaatacggaggatcgacaacctggcggcgaggcaggtgaccttctcgaagcggaggagggggctgttcaagaaggccgaggagctctccatcctctgcgacgccgaggtcgggctcgtcgtcttctccgccaccggcaagctcttccaattcgccagcaccagcatggaacagattattgaccggtacaactcgcattccaagacacttcagagagcagaaccttctcaactcgacttacaaggggaggacagcagtacttgtgccagactaaaggaggagcttgcagaaactagccttaggctgaggcagatgagaggagaggagctgcacaggctgaatgtggaacagctgcaggagctagagaagagcctcgagtccggtctaggctctgttctcaagaccaagagcaagaaaattctggatgagatcgatggactggaacgaaagaggatgcaattgatagaggagaatttaaggctgaaggagcaactgcaggtgtccaggatgtcaagaatggaggagatgcagcctgggcctgattcagaaatcgtgtacgaggaagggcagtcgtctgaatctgtcaccaatgcttcttacccgcgacctccacccgacaacgactacagctctgatacatctctcaggctcgggttgtcactcttcagctccaagtgatggctggaaactaaaactgagaggaaacagctggatggcatgcctgcatcgccaaatgatcagtgcatgcactgcaagactgcaacaaataacacagttttagattgccagatgatgatgtgtgtgtgctgagagtcactggctattatcgtacacataataacaatagaacgaacaagttcttctgttcttggatgttacctgaattctactcccatacatgttgtcaatggctctgtaatcgagtgtctgcaattccagctgaaagcaaccgattacagggaaataagctattttttcttaaagttctagctagcttggtacagttcataagccgtagaaaaacaaaggcaaataggacaatatatcaaaagtcatttttaggtaaagcttttatatctcc

SEQ ID NO: 353 - DNA, 1293 bp, Oryza Sativa
ctccccccatttccatcttccccgagctctccaccctccacccgccaccgccaccgccgccttcgccgccgccgccgccgccgacgacgatggggagagggccggtgcagctgcggcggatcgagaacaagataaacaggcaggtgaccttctccaagcggaggaacgggctgctgaagaaggcgcacgagatctccgtgctctgtgacgccgacgtcgcgctcatcgtcttctccaccaagggcaagctctacgagttctccagccactccagtatggaagggatccttgaacgctaccagcgttactcgtttgatgaaagagccgtactggagccaaatactgaggaccaggaaaactggggtgatgaatatggaattttgaagtccaaactggatgcacttcagaagagccaaaggcaactcttaggtgaacaattggacacactaacaataaaagaactccagcaattggaacatcaactggaatattctctgaagcatataagatcaaaaaagaatcagcttctgtttgaatcaatttctgagcttcagaagaaggaaaagtcacttaaaaaccagaataatgttctgcaaaagctcatggagacagaaaaggagaaaaacaatgctataataaacactaaccgggaggagcaaaatggagcaacaccaagcacatcatcaccaacaccagtgacggctccagatcccatcccgacaacaaataacagtcaaagccaaccaagaggatcaggggagtcagaagctcaaccgtctccggcacaagcaggcaacagcaagcttccgccatggatgctccggacaagtcacacatgaaggcatctgttgatctcaaacgtcactccactcaatggccaacatcaacatgtttcttccaactaaggcagccactgttgtgcaatccatcttccagcgatattgatatatcggcattcggcatagccaatatatattaatgtaatgtatcttgtcaaagcttcatagggttaatgacgccttgagcttctctgttctatatctgtcttgtaacgatctttgcatatctgctgcatttttttttctctctgatcgatgagtagtccttggtccgagattgtagagccgtgtatgtttcctctcgtcgttgtgctctgtatgcaatcgacggagatgtggtttaacttgtctcacctgctgtgatttcctttcatctgttcttcagatgtaagaaaacgaacagcgccaccgccttttcaaggattaaaagagtaggattcagaacttttttttt

SEQ ID NO: 354 - DNA, 1191 bp, Oryza Sativa
ggtagagaaagaaagatcagatcagcttcaggaccaattttagctagttgagagcaagaagacatggggaggggcaggattgagatcaagaggatcgagaacacgacaagccgccaggtgaccttctgcaagcgccgcaacggacttctcaagaaggcgtatgagctctccgtcctctgcgatgccgaggtggctctcatcgtcttctccagccgtggccgcctctacgagtactccaacaacaacaatgtgaaggctacaattgacaggtacaagaaggcgcatgcttgtggctcaacttctggtgcacctctcatagaggtcaatgctcagcaatactaccagcaggagtctgccaaactgcgccaccagattcagatgctgcaaaacaccaacaagcacctggttggcgataatgtgagcaacctgtcactgaaggagctgaagcaacttgaaagccgcctggagaaaggcatttcaaagatcagagccaggaagaatgaactgctggcttcagagatcaattacatggccaaaagggagattgagcttcagaacgacaacatggacctcagaaccaaggtaaatacatatcagattgctgaggaggagcagcagctgcagcaggctgcggcggcggcgcagcagcagcagcagaatccgttcgcggtggcggcggcgcagctggacatgaagtgcttcttcccgttgaacctgttcgaggcggcggcgcaggtgcaggccgtggcggcgcagcgccagcagatcatccccaccgagctcaacctcggctaccaccaccaccttgccattcccggcgccgccgccgccgacgcgccgcctcctcacttctgaacctcatgaacttcattctgcaccggcctgctgccatggatatgatgatcagctcatcttctatatcttatgctgttatgcagacagacactactgatgtggctatatatatagtatttgtgtgctgctgcattttgttaatcccttataaattgctacttaattatctcatggagaattggagagaccaaatgggcagagctagctagttagctgtgcccaattaagaagctaaatctatcagaagtgtgtactgatgagtgatgagtatttttcttcatttgggatcaaattaaactaagtaaaacatatatatttgacttatgttttacgtgc

SEQ ID NO: 355 - DNA, 1125 bp, Oryza Sativa
tagatcatatctcatcccatcatcggtcatattctcctcagcttcatgttgctgagctataggcgaatggttgacaagagtactagttagcttaataatatagctttgcaaaagttgaggtaatggatcgatcagagatggggaggggaagggttgagctgaagcgcatcgagaacaagatcaaccggcaggtcaccttctccaagcgccgcaacggcctcctcaagaaggcgtacgagctctccgtgctctgcgacgcggaggtggcgctcatcatcttctccagccgtggcaagctgtacgaattcggtagcgccggaataaacaagacattggaaaagtacaatagttgctgttacaacgctcaaggttcaaatagtgctcttgctggtggtgaacatcagagctggtaccaagagatgtcaaggctcaagactaagcttgaatgtctccaacgctctcagaggcacatgcttggtgaagatcttggaccattgagcataaaggaactgcagcagctggagaagcaacttgagtactcactgtcacaggctcgacaacgaaagacacaaatcatgatggagcaggtcgacgatcttcgccggaaggaacgccagcttggagagctcaataagcaactgaaaaacaagctagaagctgaagccgatagcagcaactgcagatcagccatccaggattcctgggtccatggcaccgtcgtcagtggcggcagagtgctgaatgctcaaccaccaccagatattgactgtgagcctactctgcaaattgggtactatcaatttgtccgtcctgaggcggccaatccaagaagcaatggaggaggaggggatcagaacaacaactttgtgatgggatggcccctctgaagtccaagcttgctaataaaaacgctggcgtgctataatatatagttcggcaaatgttgaaacacatgtgttctcagtatgtatatttctcccctatccggtggtactcttagcacgtacctatgagtgtatgtttgtacgttatctatactctatgctaggcaaccctatactattatggtaagacgtctatcttttcaatctatctatacgtaccatactaattggcaaattttgt

SEQ ID NO: 356 - DNA, 1266 bp, Oryza Sativa
atattctcgtcatcattggaggctttagcaagcaagaagagaggcagtggtggtggtggtggaggaggagctagctagcctgtgcttgctgatcggtgctgagctgaggaatcgttcgatcgatcgggcgagatggggaggggaagagttgagctgaagcgcatcgagaacaagatcaacaggcaggtcaccttctccaagcgccgcaacggcctcctcaagaaggcctacgagctgtccgttctctgcgacgccgaggtcgcgctcatcatcttctccagccgcggcaagctctacgagttcggcagcgccggcataacaaagactttagaaaggtaccaacattgttgctacaatgctcaagattccaacaatgcactttctgaaacccagagttggtaccatgaaatgtcaaagttgaaagcaaaatttgaagctttgcagcgcactcaaaggcacttgcttggggaggatcttggaccactcagcgtcaaagaattgcagcagctggagaaacagcttgaatgtgcactatcacaggcgagacagagaaagacgcaactgatgatggaacaagtggaggaacttcgcagaaaggagcgtcagctgggtgaaattaataggcaactcaagcacaagctcgaggttgaaggttccaccagcaactacagagccatgcagcaagcctcctgggctcagggcgccgtggtggagaatggcgccgcatacgtgcagccgccgccacactccgcggccatggactctgaacccaccttgcaaattgggtatcctcatcaatttgtgcctgctgaagcaaacactattcagaggagcactgcccctgcaggtgcagagaacaacttcatgctgggatgggttctttgagctaagcagccatcgatcagctgtcagaagttggagctaataataaaagggatgtggagtgggctacatgtatctcggatctctctgcgagccacctaatggtcttgcgtggccctttaatctgtatgtttttgtgtgtaagctactgctagctgtttgcaccttctgcgtccgtggttgtgtttccgtgctacctttttatgttttgatttggatcttgtttgaaaataatcttaccagctttgggtaaactgtttattacgtactctatatagcatatgtgaccgacgacaacggtttcattttagatgatgtgtatggatgatttctttccaaaatcacatctttagtataagagcaattttaccatccaataccaaa

SEQ ID NO: 357 - DNA, 1338 bp, Oryza Sativa
gcttctgccatgaattgctaagagggaggtgttgcatggttgtacatgtacatgtttaatttgtgaaggtggatcgattgatcaacatggggagggggaagattgagataaagagaatcgagaacaagacgagccgtcaggtgaccttctgcaagcgcaggaatgggctgctgaagaaggcctacgagctcgccatactctgcgacgctgagatcgcactcatcgtcttctccagccgaggacgcctctatgagttctccaatgtaaacagcacaaggtcaacaatcgagaggtacaagaaagcctctgccagcacttcaggatccgctccagtgatagacgtcaattctcatcaatactttcagcaagaagcagcaaaaatgcgccaccagatacagaccttgcagaatgcaaacaggcacctcatcggtgagtccattggcaatatgaccgcaaaggagctcaagagccttgaaaatcggcttgaaaagggcatcagccgaattcgatcaaagaagcatgagctgctgttctcggagatcgaatacatgcagaaaagggaagcagatcttcagaacgagaacatgttcctgagagccaaggtggcagaggccgagcgagctgaacatgatgatcagcaggcggcggaggacgacgagatggcgccggcgccggcggtcggcggcgggtcatcgtcggggacagagctggaggcgctgccggcgacgttcgacacaagggaatactaccagccggcgccgccggtgagcatgctggccgccgcggcggcggcggcggcggcgcagtactcgtcggaccaccaccagactgctctccacctcggctacttcaaggtcgactccggcaaaggcggcctcctctagatcgatcgccatggatgcaaatattgcatgcattcgatcgaattatactgtattccgtaagagcgacgacgatgaagatgacaataattattgtggtattgtacgtatagtacgctggtagacctacgtatacgtatacgtatgtatgatgaagaataaggtggtgtttggttggaggggctaaagtggggctaaactttagttcctctcacaaaaatataagttcctattatagagacttatatttttgtgagagagactaaatttagtcctagttcccaaacacccctaatatacatttgtggtgtgcatgcatggtgtgtgggtactatatgatcagagtgtgctgcatatgcgtattccgtttgctagctctgacatgcatttgtctaaatatatatttttatttatgcatattgttgccatttttctcttgtggagtggcatcttaaaa

SEQ ID NO: 358 - DNA, 2283 bp, Oryza Sativa
aaacgctactacccctccgccacagcgtccacacccgcgccgccgccgccctcaccctcgccgccgcgcatcccgcggtcccaccgtcgccgattccaccgctgccacggacaaccccgccgcccctttccttcctcgccgtgggagcgccccccccctccaggttggctagcagctagctccgccggccgcccttccccgatgggggcagcggcgtaggcgccgccatcagccgccgtacgtatgtgagcggcgcctgcgcacgcctccagctggtccgcgcgagaagaagaagaagcagaagagagaaacagtggcttttttttgctgaaccagatgccgatgcagtgacgattcgttggccgaggatcgcgttcttataggcccgatttgcaaaggagtgcttgtaaatccaatcataccatttcgattttcatttgaccaaggataggcaagaataggaggaaaaaggagagtggcatataatgacgggtggatcaggtgttgtggtgctagacaatgggggtggtcttctgaaggctggatttggtggggacatgaatccgactgctgttgtccccaactgtatggccaagccccctggttccaagaaatggctagttgctgaccagctgcaggcacaagatgttgatgttactggcatgacattgaggcgtcctattgatcgtggctatctcatcaatcaagaagtgcaacgggaggtgtgggagcgggttatacgcaacctactgcaggtggatcctaacaactcatcgttgctactggtggaaccacagttcaaccctccagcactgcagcatgcaaccgatgagcttgtttttgaggagcttggtttcaaatctctttgtgttgcagatgccccttcccttgttcacctttatgaggctagccgccagccatcgctgtttcgagctcaatgtagccttgttgttgactgtggcttctctttcactcatgcatctcccgtgcttcaaaactttacactgaattatgctgtgcggcgcatggaccttggtggaaaggccctcacaaactatctcaaagagctcatttcatatcgctcccttaatgtcatggatgaaacactcctcattgatgatgcaaaggaaaaactatgctttgtatcccttgatgtccctggtgatcttcgtcttgccaggttatcatctaatgacaacccttttagatgctcctacattctccctgatggtataacatacaagaaagggtttgtgaaggacttggatgaggcatgcagatacagctctctgcctgctaatggagaatcggttagaaaggatagttctgacagcgataggagcaagtttgaggataagaaaaagcctgaacttagtcaaaatgaatttgtgttgaccaatgagaggttcctagtgccagagatgcttttccatccaattgatctgggtatgaatcaagctgggcttgctgagtgcatagttcgtgctatacaagcttgccacccacatcttcaacctgtgctttttgagagaattatcctgacaggaggaagcacgctattccctcgattcaccgaaagattggaaaaggaacttcgtcctcttgtgcctgatgactaccaagtaaagataattgctcaggaggacccaattcttggtgcctggagaggtggatctcttttggcgcacaggcctgattttgaatcaatgtgcattacaaaatcagagtatgaagagatgggttcaatgcggtgccgtcgtagattctttcactgaaagttgtgtgccagcagctcagtagaagtgcaatttgtaagtatgattcagcactatctagttcaggtcttgaagaaatactcattaattaggcaaacgagaagtttggttctagaaggtaatgatgcacaattttaacacgtggtcatttttttacataggaattagaagctattactccatgtatctggtcccccttattactggcaaccaattctttcagccttcctaccagctaaatatgcagatatagtccttaccagggaaaacctttgtggtctaacaccctcggaacacagttgctctgagataaatggtgaattttgcttttctgctcggtgaaaagttttcttaatttttttccgagtaaacagcgtgcatggaaatattttattagtcatttactctggcaatacctgacctgtgtacgccacacagagctttagtttagaaacaacagtatgcatgatcgtcttttagaagcataaatattagtatgttagtttgt

SEQ ID NO: 359 - DNA, 2156 bp, Oryza Sativa
gctctccggcgagtcctcttcctgccctgccctgccctgccctgcattctttctttctccaccaggggaatccagttcacccccagtgctgcttctgctgctgcttctgcatcatcttgccctgttaaaaagacacagtgcccttgttctttcgcagttgcaactagcatctcctcctctacttgtactcacttcacacctcagctcagctcagctcatctcctgtcatctcagctcaaagagaaagagctgaaggtgtaagctgatcaccaggaagcagaggctttttttcagattacagttatctgaaacaaccaacttcagaatcaatcagcaaaggtagaaacaagacagagctgctgtgcttctgtgattaattagggttgttaatgccatgaaccagttcgtccctgattggaacaccaccagcatgggcgacggctttgcgccattaggcgaagacgacgggctcgtcgagctgctatggtgcaatggccacgtcgtcatgcagagccaggcgccgcggaagccgccgaggccggagaagacgacggcggcggcggcggcggcgatggcggaggatgagtcggcgtcgtggtttcagtacccggtcgacgacgtgcttgagaaggacctgttcaccgagctgttcggcgaaatgacggcggccggcggcggcggcggcgacgtccgcagggcggcgtgcaaggaggagcgcggcgcggtcgccgcgttccagagcaggatgatgccgccgccgtggccggcgagggggaaggcggagttcggtgacgtcgacgacgtgtgcggcgtctcggaggtcgtcatggcgaagatggacggggcggcggcggcggagacggtcggcgagtcatcgatgctgacaatcgggtcgagcatctgcgggagcaaccacgtccagacgccgccggtggggaacgggaaggccggcgccggcaccgccggcgccgccagaagggcgcacgacacggcgacggtggcgtcgtcgtcgatgaggtcgaggtcctgcaccgccaaggccgagccgcgcgacgtcgcagccgccggcgtcggcggcaagcggaagcagcgcggcggcgccgccatggagtccgggagccccagcgaggacgtggagttcgagtccgccgccgcaacgtgctcgccggcgcagaagacgacgacggcgaagcggcggcgcgccgccgaggtgcacaacctctccgagaggaggagaagagataggatcaatgagaagatgaaagcattacaggagctcatacctcactgcaacaaaacggacaaagcatcgatgctggatgaagcgatcgagtatctcaagtcactgcagctccagctacagatgatgtggatgggcggcggaatggcgccgccggcggtgatgttcccggcggccggcgtgcaccagtacatgcagcggatgggcgccgtcgggatgggcccaccacacatggcgtccctgccgaggatgccgccgttcatggcgccgccgcccgccgccgtgcagagctcgccggtggtcagcatggccgacccctacgcccgctgcctcgccgtcgaccacctccagccaccgcctccgatgcattacctgcaggggatgagcttctaccagctcgccgcggccaagaaccttcagcagcagcagaacacggcggaggcgccgccaccgccaccggccggaggcaaccgcgcagccgctgactcctgacgacattctgcacaaaaaatacgacaactgtagtaagtctgagagcaagggtggcaccagttgattgccgtcaatctgaagatatgtatataaggctctgatgcaattgagttgagaggctggatcatgatggctacctaatcattaaggggaatttaagatcatcccttttactgacgtctaaattcggtaggcagtgtagatcgatcagcggttaagagttaacaagtcgtgaattcttttttgctatgtatgtagtactattttttcccctttggggagacattggttatgtatcagttgttgatgtacctgttcaaatttatgccaaccagagcaaattgtattatcatccgcctcaactgtgtcatgtcatgttaatttaactgcatctaccaaagtacaaagtcttaattaaccaaaa

SEQ ID NO: 360 - DNA, 1220 bp, Brassica napus
atggctttaacacagatccaaatctttctcattgtctctctagtttcatcattcagtttatcgaccactctttctcgtccactcgatgaagtcaccatgcaaaagagacatgccgcgtggatgaccgaacacggccgtgtttacgcagatgcgaacgagaaaaacaaccgctacgttgtgttcaaacgcaacgtggaaagcattgaacgcttaaatgaagttcaatacggactaacgtttaaactcgcggtgaaccagtttgctgatctaaccaacgaagaattccgttctatgtacactggttacaaaggaaactcggtgttgtctagtcgaacgaaacctacgtcgtttaggtaccaacacgtttcttctgatgctttgccgatttctgttgattggaggaagaaaggagctgtgactcctatcaaggatcaaggctcatgcggatcttgttgggcgttttcagctgttgcggctatagaaggagtagcacagataaagaaagggaaactcatttctttgtctgaacaagagcttgtcgactgcgacacaaacgatgatggctgcatgggcggttacatgaatagtgcgtttaactacacaatgactactggcggcttaacctctgaatcaaattatccttataaaagcacagacggcacttgcaacatcaacaaaactaaacagatagcaacttctatcaaaggttttgaggatgtcccggctaacgatgagaaagccctaatgaaggcagtggcacaccacccggttagcattggaatagcgggaggaggtactggtttccaattctattcgtccggtgtgttcagcggagagtgctcaactcatcttgatcacggggtagctgtagttggatacggcaaatctagcaacggatcaaagtactggatcctcaagaactcatggggaccaaaatggggagaacgtggatacatgaggatcaaaaaagataccaaggctaaacacggacaatgtggtcttgccatgaacgcttcttacccaactatgtgaaaaaatcggttcagtatccggttaagctttaaaataaatgtgtgtttggttatagtttaagactgttgcatgtaatatgcgaaatggtaagtttatgtaatgcaaaagatttgatactttgaataaagttgagaacttcattatataactcatatggggtttgccatcataatgaaatcagattctct

SEQ ID NO: 361 - DNA, 1245 bp, Brassica napus
atggctttagaacacatcaaaatctttctcattgtctctctagtttcatcattctgtttctcgaccactctttctcgtcttctcgaccatgaactcatcatgcaaaagaagcacgacgagtggatggccgaacatggacgtacttacgcagatatgaatgagaaaaacaatcgctacgttgtgttcaaacgcaacgtggaacgcattgaacgcttaaacaacgttcccgccggaagaacgtttaaactcgcggtaaaccagtttgctgatctaaccaacgacgagttccgttctatgtacactggttacaaaggagactcggtcttgtctagccaaagtcaaacaaaatccacgtcgtttaggtaccaaaacgtttcttctggtgctttgccgattgctgttgattggaggaagaaaggagctgtgactcctatcaagaatcaaggcagttgtggatgttgttgggcgttttcagcggttgcggctatagaaggagcaacgcagataaagaaagggaaacttatttctttgtctgaacaacagcttgtagactgcgacacaaacgattttggctgcagcggcggtctaatggatactgcgtttgagcacataatggccactggcggattaaccactgaatcaaattatccttataaaggcgaagacgccaattgcaagatcaagagcactaaaccgtcagcagcttctatcacaggctatgaggatgtccctgttaacgacgagaatgctctaatgaaggcagtggcacaccaaccggttagcgttggaatagaaggaggtggttttgatttccaattctactcgtccggtgtgtttaccggagagtgcacaacgtatcttgatcacgcggtgactgccgtaggatacagccaatcttccgccggatcaaagtattggatcatcaaaaactcatggggaacaaaatggggagaaggtggatacatgaggattaaaaaagatatcaaggataaagaaggattatgtggtcttgccatgaaggcttcttacccaactatatgaaaaaccggttcaatacccggtcaaggttaaaatgtgtatatgtgtgggttttatgtcttaaaatggtgatatgaatagtttgtatgggtgtcacaaaaaaaaaaaagaatagtttgtatggttataattaaagactgttgtatgtaatctgtgaaaaaggtaaggatgcaaaagatttaataagttcagattgtttatttcaaa

SEQ ID NO: 362 - DNA, 1593 bp, Glycine max
caacacaaacacacatcctatctcttcttaaggattctctaagtgccatagtttggcatcttaatcattgctcattgttgatgcccataaggaacatgtaacttcctcatttatttttcttttgttttccttctcacttattagctttcatttccctatataaagcctccattgctcccttctctccccatcttttattgaattgattccaaatacaaacatggcaatgaagaagttcttgtgggttgttctgtccctttctttggtccttggagtggccaatagctttgattttcacgacaaggatttggagtccgaggaaagcctgtgggacttgtacgagagatggaggagtcaccacacggtttcgcgaagccttggtgacaagcacaagcggtttaacgtgttcaaagcgaatgtgatgcatgtccataacaccaacaaaatggataagccttacaagctgaaactaaacaagtttgctgacatgaccaaccatgaattcaggagtacctatgctggctcaaaggttaatcaccatagaatgttcagagacatgccacgtgggaacgggaccttcatgtatgagaaggttggtagtgttcctgcttcagtggattggaggaagaaaggtgctgtaactgatgtaaaagatcaaggccattgtggtagttgttgggcgttttcaactgttgtagctgttgaaggcattaaccaaatcaagacgaataagctagtctccttgtctgaacaagagctggtggactgtgacaccgaagaaaatgcaggatgcaatggtgggttaatggaatctgctttccagttcatcaagcagaagggaggcataacaacagaaagctattacccttacacagctcaagatggaacatgtgatgcatccaaggcaaatgacctagctgtatcaattgatggccatgagaatgtacctggtaacgatgaaaatgcattgctcaaagctgttgccaaccaacctgtttctgtagccattgatgccgggggatctgatttccagttctactccgagggagtatttactggtgattgtagcacggagctaaatcatggtgtggcgattgtggggtatggagcaactgttgatgggactagttactggatagtgaggaactcttggggaccagaatggggagaacagggttacatcagaatgcaaaggaacatatctaaaaaggagggactttgtggcatagctatgttggcttcctacccaatcaaaaactcctccaataatccaacaggaccttcatcatctcctaaagatgaactttgaagtttgaatgcttcccacaaaatcatactctaattagctttggttgttgttttctattagtatctcagattcaatgccagtgtatccatcaatatatttatgcttattacatcccaaagaaataaatattttatatgatttgagtgctagcaatttctcatgtaatctcctttctatggccaagagtttcatgcaaaatgataactttactttaaagcatttatatagatagcaatagatcaactagagtccagattgcaatatgatttgatcactttgaagat

SEQ ID NO: 363 - DNA, 1458 bp, Oryza Sativa
accaccacctcacaagctaattcaacctactaagctagctagctagtgacaattaagtgatcacaagtgttgttgcgatgggtagagtagtggtcgtcgtggcggcggcggcggtagccgtggccgtcgtcgtgctgctgggcgcggcggcgccggcggcgagcgcgatggagttcggcgacaaggacgtggcgtcggaggaggcgctgtgggagctgtacgagcggtggcgcgggcagcaccgggtggcgcgggacctcggcgagaaggcgcggcggttcaacgtgttcaaggacaacgtccgcctcatccacgagttcaaccgccgcgacgagccctacaagctccgcctcaaccgcttcggcgacatgaccgccgacgagttccgccgcgcctacgcctcctcccgcgtctcccaccaccgcatgttccgcggccgcggcgagaggcgcagcggcttcatgtacgccggcgcccgcgacctgccggcggcggtggactggcgcgagaagggcgccgtcggggcggtcaaggaccagggccagtgcggcagctgctgggcgttctcgaccatcgccgccgtggaagggatcaacgccatccgcaccagcaacctcaccgcgctgtcggagcagcagctcgtcgactgcgacaccaagaccggcaacgccggctgcgacggcggcctcatggacaacgcgttccagtacatcgccaagcacggcggcgtcgccgcctcctccgcctacccgtaccgcgcccgccagagctcctgcaagagctccgcggcgtcgtcccccgccgtcaccatcgacggctacgaggacgtgccggcgaactcggagtcggcgctgaagaaggcggtggcgaaccagccggtgtcggtggcgatcgaggcggggggctcgcacttccagttctactcggagggggtgttcgccgggaaatgcgggacggagctcgaccatggcgtggcggcggtgggctacggcacgacggtggacggcaccaagtactggatcgtcaggaactcgtggggcgcagactggggtgagaagggctacatccggatgaagcgcgacgtgtccgccaaggagggactctgcggcatcgccatggaagcatcctaccccatcaagacctcgccgaacccggcgcccaagaagatcaagaaggtcaccgacgacgacgaagatgatgatgacgaggagcaccgccaccacgacgaactctaagctcatttaattgtgtgttttacaacagtaactggctaccgtttggaggcgattgatcgacgtcgtaacaaaataagcagttcgttaatttaatcacctgtagttgatttgattgcatgctcgtattttttgcaatctagctcgattatgtttacgctgtgtaatgattattgattattaatttgaaaaagattgttaagtatgaattttgtccgatattttc

SEQ ID NO: 364 - DNA, 1649 bp, Oryza Sativa
acgtctcctcccttctccttcctcctcatcgccctcaccctccaattccaatccctcccaagaactagctgatcacgacgagcagctagtccactgctactgcgatcgatcggttgcaaagttaattaattagtggcgatcgatcgatcatggggagggttattagcagctggagggttcttgcggtggtggctgctttgatggccatggcggcggtggagctgtgcgccgcgataccgttcgacgagagggatttggagtccgacgaggcgctgtgggatctgtacgagcggtggcaggagcaccaccacgtgccgcgccaccacggcgagaagcaccgccggttcggcgcgttcaaggacaacgtgaggtacatccacgagcacaacaagcgcggcggccggggctaccgcctccggctcaaccgcttcggcgacatgggcagagaggagttccgcgccacgttcgccgggtcccacgccaacgacctccgccgcgacggcctcgccgcgccgccgctcccggggttcatgtacgagggcgtccgcgacctcccccgcgccgtcgactggcgccgcaagggcgcggtcaccggcgtcaaggaccagggcaagtgcggcagctgctgggcgttctccacggtggtgtccgtggagggcatcaacgcgatccggacggggcggctggtgtcgctgtcggagcaggagctgatcgactgcgacacggcggacaacagcggctgccagggcgggctcatggagaacgcgttcgagtacatcaagcacagcggcggcatcaccaccgagtccgcctacccgtaccgcgccgccaacggaacgtgcgacgccgtccgcgcgcggcgcgcgccgctggtggtgatcgacgggcaccagaacgtgccggccaacagcgaggccgcgctcgccaaggccgtcgccaaccagcccgtctccgtcgccatcgacgccggcgaccagtccttccagttctactccgacggcgtcttcgccggcgactgcggcaccgacctcgaccacggcgtcgcggtggtcggctacggcgagaccaacgacggcacggagtactggatcgtcaagaactcgtggggcacagcctggggcgagggcggctacatccggatgcagcgcgactccggctacgacggcggcctctgcggcatcgccatggaagcctcctaccccgtcaagttctcgccaaatcgtgtcacgccaaggcgcgcccttggcgccaaggaaacccagtgatcgagccggcgccatctccgccgtacacgtgcccgcctacgagcctggatcaacggctctggtcgcgtctcctcctccagcttgcaaaatggtgctattattgttgctgctctttgttaattgccttgtgtttatgtaattcgtgtgaggcgatcagggaaaagaattacctgaaatcgtctaagttactagtgttatttcgtgtgtgctaaataagttttagatgtgaggtgaggtcgatctatcatgtaatgtactgaacttatatgtggtgttcttcgtggcaccgggaaatatatataagaaggttgttgttatgactaaggttatgccaaatttcatccaaaaaagactaaggttatgccaaatttcatccaaaaaaaa

SEQ ID NO: 365 - protein, 424 aa, Brassica napus
MNNRSFSTTTTISEDYMLFPYNDHYSSQPLLPFNPCSSINDILIHSNSNISSNPLDHHYQFLQAPSSFSQFEFVPDFALVASFLPQNNGHNDNQTITTNDHNNNHHHHHPSLLPLNNPIGESLVEPLETIATHIEDSQRISTSQDPKMNKVKKPSRTDRHSKIKTAKGTRDRRMRLSLDVAKELFGLQDMLGFDKASKTVEWLLTQAKPEIIKITSSLSNPLNHGGFSSCEESQTRPALGSMHTSSDLCKLSSMGTVEDRGSNTNSTETRGNKVDGRSMRGKRKMLQARTPILKKLSKDERAKARERAKDRTKEKLMKRRSQVTVLDAEAHNQHDEIVKNNKSHVNCKSFEATPCQEETEELLCKNDGFAVCNEFVVNKFNSSFPMPNHHRSQGTVSSIEQRQFMDLHHFLERPRDLMYNYHNM

SEQ ID NO: 366 - protein, 283 aa, Brassica napus
MKNAKKPSRTDRHSKIKTAKGTRDRRMRLSLDVAKELFGLQDMLGFDKASKTVEWLLTQAKPEIIKIANSLSNQFKHGGFSSGDDSQTRPALGSTETSSDLCEFASVWTVEDRCSNTSMTENKVDGRTMRGKRKMSQRTPILKEMSKDARAKARERAKDRTMEKIMKRRPQVNAVEEVEAHNQHDEVVKNNNSGVNWTTSFEVTPSGKNMEELCKNNRFAVYNDIVVNKKDHISEESYNMISQLNSSFPMLTHHRSQGAATSMEQQQHQVRDVHHFLYNYHNM

SEQ ID NO: 367 - protein, 338 aa, Brassica napus
MFPSIDTNGHDLFDPFNLHEATMFPSFTTHILSPSSHHHYPFPSFPSSSDFLDESVLISQFLLQQQANVDSPRKLCKELEQEKKNEEWVDGTTSEKVSPRRTGKKRDRHSKICTAHGPRDRRMRLSLQIARKFFDLQDMLGFDKASKTIEWLISKSKASIKQVKESAAAAASGNHEHLQVSDNVNDKTQKVSKGRTKRVDDSCKKKESREKARERARERTMTKMKMRLSGPIDTSKTFADPNQESRKTKITGGAQVEGENLEQERSIIEKFLGLTSESSSSTIFGDSEESYTSLGSIRETVSTGGMVIPREHNTTLTASVDEERNPISTFSLYDYLCY

SEQ ID NO: 368 - protein, 332 aa, Brassica napus
MFPSIDTNGYDLFDPFNLHEATMLPSFTTHILSPSSHHHYPFPSSSDFLDESVLISQFLLQQQADVDSPRKLRRELEQEKKNEEWVDGTTSEKVSPRRTGKKRDRHSKICTAQGPRDRRMRLSLQIARKFFDLQDMLGFDKASKTIEWLISKSKASIKQVKESAAASGNHEHLQVSDNVNDETQKVSKGRTKRVDDSCKKKQSREKARERARERTMTKMKMRLSGLIDTSKTFADPNQVSRKTKIIGGAQERENLEQERSIIEKFLGLTSESSSSTIFGDSEESYTSLGSIRETVSTTGMVIPREHNTTSTASVDEERNPISTFSLYDYLCY

SEQ ID NO: 369 - protein, 530 aa, Brassica napus
MKTQHLWWEVLDLFLLQNKALVPFLSFIAVVVIVLYLYRPSWSVLNVPGPTAMPLVGHLPMLAKYGPDLFSVLAKHYGPIFRFQMGRQPLIVVAEAELCREVGIKKFKDIPNRSIPSPISASPLHQKGLFFTRDKRWSKMRNTILSLYQPSHLTSLIPTMQNFITRATHNLDSEPEDVVISNLFLKLTTDIIGQAAFGVDFGLSGKKTIKKDSADSSNVEVTDFINQHVYSTTQLKMDLSGSVSIILGLLIPFLQEPFRQILKRIPGTMDWRVEKANTRLSGQLNEIVSKRAKERDTDSKDFLSLILKARELDSFAKRIFTPDYISAVTYEHLLAGSATTAFTLSSVLYLVSGHLEVEKRLLQEIDEFGGRDLIPTSHDLTYKFPYLDQVIKEAMRFYMVSPLVARETAKEVEIGGYLLPKGTWVWLALGVLAKDPKNFPDPEKFKPERFYPNGEEEKLRHPYAFIPFGIGPRACVGQRFALQEIKLTLLHLYRNYIFRHSPDMEKPLQLDYGVILSFKNGVKLRAIKRF

SEQ ID NO: 370 - protein, 681 aa, Brassica napus
MAPSTITTTLSDLPDVILSNISALVTDTRARNSLSLVSRKFLALERSTRSHLTLRGNARDLHLLPGCFRSISHLDLSFLSPWGHSLLSSLPTDHQNLLALRLRLCFPSLDSLAVYSRSPTSLELLLPQWPRIRHVKLVRWHQRPSQIPLGGDFVSVFEHCGFLESLDLSAFYHWTEDLPPVLLRYADVAARLIRLNLLTASFNEGYKSSEIVDITKACPNLRDFRVACTFDPRYFEFVGDETLSAVSTTCPKLTVLHMVDTAALTSPRAIPDGGDSAVTVGTLVEVFSALPCLEELVLDVGKNVKQSGVALEALNSKCKKLRALKLGQFHSVCSATEWRLEGVALCGGLQSLSIKNSGDLTDMGLVAIGRGCCKLSKFEVQGCENVTVKGVRTMVTLLRKTLTDVRISCCKNLDATASLKAVEPIYDRIKKLHIDCVWSSVEEEGGVEETNHDDDDDYERSRKRCKYSSGESLNGFCSEERVWEKLEYLSLWINVGEFLTPLPMTGLDDCPNLEEIRIKIEGDCRGKHKPAEPELGLSCLALYPKLSKMQLDCGDTIGYALTAPPMQMDLSSWERFFLIGIGNLSLSELDYWPPQDRDVNQRSLYLPGAGLLQECLTLRKLFIHGTAYEHFMNFLLRIPNLRDVQLREDYYPAPENDMSTEMRVGSCSRFEDQLNSRNIID

SEQ ID NO: 371 - protein, 118 aa, Brassica napus
MSPCKRKNEEEAVAAVCLISKAPEGISLDIPQRKEKDEQECSREETSTGLVSYQDCNSYAEPPDTCKRKKYDEEETDAAHASCGIIISKTPERSREILKEKTVQGLISGFSYGKRQNR

SEQ ID NO: 372 - protein, 574 aa, Brassica napus
MHFPAKTEKHFPAKTAKCIFPQNRKMHFFAKTEKKTIFPQNRKTHFPAETKKRIFPPKQKKPVINSASPVPKKETVEDERRCHVAWTSVQQEKWEGELTVQGKIPTWLNGTYLRNGPGLWNIGDHDFRHLFDGYSTLVKLEFDDGRIFSGHRLLESNAYKAAKKHKKLCYREFSETPKPSRSNFKNPFSGVGEIVKLFSGESLTDNANTGVIRLGDGRVMCLTETQKGSILVDHDTLDTIGKFKYDDGLCDHMIHSAHPIVTETEMWTLIPDLVKPGYRVVRMEAGSNKREVVGRVKCRSGSWGPGWVHSFAVTENYVLIPEMPLRYSVRNLLRAEPTPLYKFEWCPNDGAFVHVMSKLTGEIVASVEVPAYVTFHFINAYEEDENGDGKATVIIADCCEHNADTRILDMLRLHTLRSSHGDDVLPDARIGRFRIPLDGSKYGKLETAVEAEKHGRAMDMCSINPLYLGLKYRYVYACGAKRPCNFPNALTKVDIVEKEVKIWHEHGIIPSEPFFVPRPGATHEDDGVVISIVSEENGGSYAILLDGSSFEEIARAKFPYGLPYGLHGCWIPKH

SEQ ID NO: 373 - protein, 470 aa, Brassica napus
MEDPTASNVTPPANSSSQIIPSPSSVKVSLESRINRLINANQSPSPSRSIYSDRFIPSRSGSNFALFDLASPSPSKEDGAGSYATLLRAAMFGPETPEKRDITGFSTSRNIFRFKTETNRCLNSFSPFVSDDGPGVSHAPIKALRKVSRSPYKVLDAPALQDDFYLNLVDWSAQNVLAVGLGNCVYLWNACSSKVTKLCDLGADDSVCSVGWAFRGTHLAVGTSSGKVQIWDASRCKRTRTMEGHRLRVGALAWGSSVLSSGSRDKSILQRDIRCQEDHVSKLAGHKSEVCGLKWSYDNRELASGGNDNRLFVWNQHSTQPVLKYSEHTAAVKAIAWSPHVHGLLASGGGTADRCIRFWNTTTNTHLSSIDTCSQVCNLAWSKNVNELVSTHGYSQNQIIVWKYPTMSKIATLTGHTYRVLYLAVSPDGQTIVTGAGDETLRFWNVFPSPKSQNTDSDIGSSFFGRTTIR

SEQ ID NO: 374 - protein, 516 aa, Brassica napus
MNESSKKVEAGERQFDPSPSPNLVLRFAHITCFLSLSLLFSSPTLVLLSKCSVLCQAKKGSFTPLTTRSFPNSLINRFWCFSVCMECNAKPSLQWEWDNLISFGTSSAEIPKKQRPMDWENDGFDCTTFYSSSFSTVAAYGGSSGSDLAHAFSKSSKSTSISSSSAEVRTYNFTSEAGESVPAGSSEEFAMGIDTSPSLELSFGSGDPVLGLKLGKRTYFEDFWEVENAKGSAALPVSLASSSASPVKKSKPISQKLQTPHCQVEGCNLDLSSAKDYHRKHRICENHSKFPKVIVNGLERRFCQQCSRFHCLSEFDEKKRSCRRRLSDHNARRRKPNPGRTYDGKQHMDFVWNRFALIHPRSEEKFLWPNPKPVPSRGLLQEPATTEMPSKLFTEQCGFGLLDPKTKTTRAELFSKDLLEKVTISSHISTSQDLDGALSLLSNSTPWVSSDQPRRFSLNHHSTSNLQPVVHGSVTQPNSVSSYWQPDPPAVEGSTALPRNGEGQFNDHYNLNQFYN

SEQ ID NO: 375 - protein, 311 aa, Brassica napus
MILNAVEKKKRKITTYSSHTPAQLKLLYKQYLSYFPSQPFKQRKMSQHNILEALNVRVVGTGDRILVLAHGFGTDQSAWHLILPYFTQTYRVVLYDLVCAGSVNPDYFDFNRYTTLDPYVDDLLSIIDSLGIQTCAYVGHSVSAMIGIIASIRRPELFTKLILIGASPRFLNDEDYHGGFEEGEIEKVFSAMEANYEAWVQGYAPLAVGADVPEAVREFSRTLFNMRPDISLFVSRTVFNSDLRGVLGLVRVPSCVIQTAKDVSVPASVAEYLRAHLGGDTTVETLKTEGHLPHLSAPAQLAQFLRRALPR

SEQ ID NO: 376 - protein, 264 aa, Brassica napus
MNTKLSLSQTKIIGFTIRLNDTRTRYGRSSISATLSSKPAYSGELKVVKETSGTELLKKKNASNEDNFLSKIAINYLSKTLQDTAGMSSSSSKSTGYDSLVDTATRVAGNLDIKQQHELVLVALDRAFPAVILSLIKMLLPPSKLSREMFALFTTVFFAWLVGPSEVRETEVNGKKEKSMVFIKKCRFLEQTNCVGMCTHLCKIPSQIFIKNSLGMPIYMMPDFDDLSCKMMFGQEPPEIKDDPVMKQPCFQFCKSNRSYGVKH

SEQ ID NO: 377 - protein, 668 aa, Brassica napus
MMIKMSLPLPPKIFLPPSNSPPTHHHQAPPPLAPPRAAISIAIPETGLGRTGTIHEESTSSAFRDYQSLFLSQRSETVEPVVIKPIEGSIPVDFPSGTYYLAGPGLFEDDHGSTVHPLDGHGYLRAFHIDGSKRKATFTAKYVKTEAKQEEHDPVTDTWRFTHRGPFSVLKGGKRFGNTKVMKNVANTSVLKWAGRLLCLWEGGEPYEIESGSLDTVGRFNVAINGCDDDSDRDVAGHDIWDTAAGLLKPILQGVFKMPPKRFLSHYKIDDRRNRLLTVTCNAEDMLLPRSNFTFCEYDSEFKLIQTREFKIDDHMMIHDWAVTDTHYVLFANRVKLNLIGSMAAMFGMSPMVSALTLNPSNESSPIYLLPRFSEKSMGGRDWRVPVEVSSQLWLIHSGNAYETREDNGDLKIQIQASACSYRWFDFQKMFGYDWQSSKLDPSVMNLNRGDDKLLPHLVKVSMTLDAIGNCKSCDVEPLNGWNKPSDFPVINSSWSGEKNKYMYCASSSGTRRELPHFPFDMVVKFDLDSNTVRTWSTGARRFVGEPMFVPKSSSEGEEDDGYIIVVEYAVSVERCFLVILDAKKIGESDAVVTRLAVPRNLTFPMGFHGIIVGNDQEGDDSVPLNNMFGYSTSLRSMTQGKGEFATEYKEHSDVSNEVQAQLVNADN

SEQ ID NO: 378 - protein, 569 aa, Brassica napus
MASLITAKAIMMSHHHVLSSTRITTLCSDKANDNQQRKTKLHISHRFFSRRTISAAVINSASPVPKKETVEDERRCHVAWTSVQQEKWEGELTVQGKIPTWLNGTYLRNGPGLWNIGDHDFRHLFDGYSTLVKLEFDDGRIFSGHRLLESDAYQAAKKHKKLCYREFSETPKPSRSNFKNPFSGVGEIVKLFSGESLTDNANTGVIRLGDGRVMCLTETQKGSILVDHDTLETIGKFKYDDGLCDHMIHSAHPIVTETEMWTLIPDLVKPGYRVVRMEAGSNKREVVGRVKCRSGSWGPGWVHSFAVTENYVLIPEMPLRYSVRNLLRAEPTALYKFEWCPNDGAFVHVMSKLTGEIVASVEVPAYVTFHFINAYEEDETGEGKATVIIADCCEHNADTRILDMLRLHTLRSSHGDDVLPDARLIGRFRIPLDGSKYGKLETAVEAEKHGRAMDMCSINPLYLGLKYRYVYACGAKRPCNFPNALTKVDIVEKKVKIWHEHGIIPSEPFFVPRPGATHEDDGVVISIVSEENGGSYAILLDGSSFEEIARAKFPYGLPYGLHGCWIPKH

SEQ ID NO: 379 - protein, 241 aa, Glycine max
MEHTPRKRSSKRDRHSKINTARGLRDRRMRLSLEVAKRFFGLQDMLGFDKASKTVEWLLNQAKGEIKQLAREKTSVVGGGGKSASSTSECEGEQERETVPNMMKRRKSKVCRKSAFNAIDKESREKARERARERTREKMRTRRVLVSDASNLNHSAGTTHHPSLDVHLHEADQEPISSHNVKEHNLGEDMAHEDNSLALMNKWSPTMLFNSLHNSGILQETLELYKYACGCFKHYHVGLIH

SEQ ID NO: 380 - protein, 246 aa, Glycine max
RSQLFAQKKTIRKKDAPCSIAMEHTPRKRSSKRDRHSKINTARGLRDRRMRLSLEVAKRFFGLQDMLGFDKASKTVDWLLNQAKGEIKQLGREKTSVGGAKSASSTSECEGEQERETVPNMKRRTNKVCRKSAFNPIDKESREKARERARERTREKMRTRRVLADASNLNHSAGTTHQSQSVNHPSLDVHLPEADQEPSSHNAKEHWGENMAHEDNSLAIMNKSPSGMRAGKTLELYKYMHGWFKH

SEQ ID NO: 381 - protein, 190 aa, Glycine max
  misc_feature (190)..(190): Xaa can be any naturally occurring amino acid
KKPPKKDRHSKIYTSQGLRDRRVRLSIEIARKFFDLQDMLGFDKASNTLEWLFNKSKRAIKELARSKHSNNNSDNKSPTTLMAAKERMKLKRTQKEPAKMKESREKARARARERTSNKIIMCNVNTNNTGGKVLQDLKKKCPAIENNHTQIMHQSRKLKPSLMSSSDHHHHHHQNLVMPKEPPSFNNNNX

SEQ ID NO: 382 - protein, 527 aa, Glycine max
MVVFMDYLEWLFAIPSVPSASAMFTLLALIGGLLVYLYAPYWGLRKVPGPPSLPLVGHLPLLAKYGPDVFSVLAKQYGPIYRFHMGRQPLIIIADAELCKEAGIKKFKDISNRSIPSPISASPLHQKGLFFSRDSQWSTMRNTILSMYQPSYLSRLVPTMQSFIESATQNLDSQKEDIIFSNLSLRLATDVIGHAAFGVNFGLSRPHSVCDSIKISDFIDQHIYSTTQLKMDLSGSLSIILGLLLPILQEPFRQILKRIPGTMDWKIERTNQKLSGRLDEIVEKRMKDKARSSKDFLSLILNARETKAVSENVFTPDYISAVTYEHLLAGSATTSFTLSSVVYLVAGHPEVEKKLLHEIDGFGPVDQIPTSQDLHNKFPYLDQVIKEAMRFYTVSPLVARETSNEVEIGGYLLPKGTWVWLALGVPAKDPKNFPEPEKFKPDRFDPNCEEMKRRHPYAFIPFGIGPRACIGKQFSLQEIKISLIHLYRKYLFRHSPNMENPLELQYGIVLNFKHGVKLRVIKRTETC

SEQ ID NO: 383 - protein, 701 aa, Glycine max
VFAAVSDTRTRNALSLVSWSFYRLERKTRTSLTLRGNARDLHLIPTSFKHVTHLDLSFLSPWGHALFCSSSSSAAAAAVDHQRHLAQHLRAAFPRVTSLAVYARDPDTLRLLLLSPWPELSAVKLVRWHQRPPTSANEADFAELFKKCRSLASLDLSSYYHWTEDIPTVLAANPISAAFLRRLNLLTTSLTEGFKSHEIESITASCPNLEHFLAVCNFDRRYIGSVSDDTLVSIASNCPKLSLLHLADTSSFSSRREEDEGFDGEDASISRAALMTLFSGLPLLEELVLDVCKNVRESSFAFEVVGSKCPNLRVLKLGQFQGICLAFESRLDGIALCHGLQSLSVGNCADLDDMGLIEIARGCSRLVRFELQGCRLVTERGLRTMACLLGRTLIDVRVSCCVNLDTAATLRALEPIREQIERLHVDCVWNGLKESDGLGHGFLSFDLNGLDEQDDVGKLMDYYFGGGECENTSKRKRQRCEYQMRVHDSFLESNGNGFYGKSWDKLQYLSLWIKVGDLLTPLPVAGLEDCPVLEEIRIKVEGDCRGQPKPAESEFGLSILACYPQLLKMQLDCGDTKGYALTAPSGQMDLSLWERFLLNGIGSLSLSELHYWPPQDEDVNQRSVSLPAAGLLQECYTLRKLFIHGTAHEHFMNFFLKIQNLRDVQLREDYYPAPENDMSTEMRVGSCSRFEDALNRRRICD

SEQ ID NO: 384 - protein, 618 aa, Glycine max
MQAKPIHNTPTYIPPPIRPSPPVHQTPPSIPSIKPRAISISAPNIPIAVPIPPIVEPDDSNAAYYDYQFLFMSQRSEATRPVTLSTVEGAIPADFPSGTYYLTGPGLLADDHGSTVHPLDGHGYLRAFTFDNNVTKNVKYMAKYIKTDAHVEEHDPKTNKWKFTHRGPFSVLKGGKKVGNTKVMKNVANTSVLKWGEKLLCMWEGGEPYEIQAGTLDTIGQYNMMDGADMENHDQSKGGGGGDVWEVAANLLKPILYGVFKMPPRRLLSHYKVDSRRNRLLTVSCNAEDMLLPRSNFTFSEYDSNFNVVQKQVFRIPDHLMIHDWAFTDTHYIVFANRIKLDVLGSMAAVYGMSPMISALRVNPSKSTSPIYLIPRFPGKNNGKERDWRVPVEAPSQLWLLHVGNAFEVRHPHGNLDIKIQAAACSYQWFNFSKLFGYDWQKKKLDPSIMNVKGGSKLLPHLVQVSIKLDSDYNCQECDVKPMKKWKKSSDFPATNPTFSGKKNKYLYAATTLGSRKTLPCFPFDTVVKLDLETTESVAQTWTAGSRRFIGEPIFVPKGYQEDDGYLLVVEYAVSMNRCYLVILDPKRIGADNALVARIEIPSHLNFPLGFHGFWAAN

SEQ ID NO: 385 - protein, 549 aa, Glycine max
MLVPDMPHNNISLRNKGFIYKGQHGINLRDFTKANVASPSLPVIAPPTPEERKETTADDRHHHHHHVAWTSIPQERWEGELQVQGKIPLWLKGTYLRNGPGMWHIEDYNFRHLFDGYATLVRLGFQNGRLVAGHRQIESEAYRAAKKNKKICYREFSEVPKAANFLAYVGELASLFSGASLTDNANTGVVKLGDGRVVCLTETQKGSIVINPETLETVGKFEYSDSLGGLIHSAHPIVTDNEFLTLLPDLVRAGYLVVRMEPGTNERRVIGRVNCRGGPAPGWVHSFPVTEHYVIVPEMPLRYCAQNLLKAEPTPLYKFEWHPESKAFMHAMCKTSGKIVASVEVPLFVTFHFINAYEEQDEDGRVTAIIADCCEHNSDTTILDRLRLQNLRSFNGEDVLPDARVGRFRIPLDGSPYGTLEAALEPNEHGRGMDMCSINPNYLGKKYRYAYACGAQRPCNFPNTLTKLDFELKKAKNWHEEGAVPSEPFFVARPGATEEDDGVVISIVSEKNGEGYALLLDGSTFEEIARAKFPYGLPYGLHGCWVPKE

SEQ ID NO: 386 - protein, 396 aa, Glycine max
MQSQSSDTFPSHNRNDPISYYDPAFYYYNSRPFFIDSESNPTSKQENNNNNCDLVPSPPPPLSFFHFPSPTFEDTQNQIFLEQRHDFLLQFYHQPLPQDPEPQPVITTMDLSVKKSDQIQRKRVPGKRDRHSKINTARGLRDRRMRLSLEVAKRFFGLQDMLNFDKASKTVEWLLNQAKVEINRLVKEKQKQQQQKKKEENDHHYYQSCSSASSECDQEGVSCLDEVVVSGDQEQQQERVEKVVKRKVKNSRKISAFDPLAKECRERARERARERTREKMRNRGVLAEESKQCGEETNQDLIQLGSWNPFETGDQESAGAKRTTTHSVAEHPSSLDVITIEAKEQSYHAAKEHDDDDDDSLVVLSKWSPSLIFNNYGFSQDHQFAEFQSLGKLWEA

SEQ ID NO: 387 - protein, 385 aa, Glycine max
MQSQSSDTFPSHNGNDPISCYDPAFYYYNSRPFSPIDSESNPTSKQDNNNNCDLVPSPTPLSFFHFPSSPFEDTQNQILLEQHHDFLLQFHHQSLPKDPVPQPAVITTMDPFVKKSDQIQRKRPGKRDRHSKINTARGLRDRRMRLSLEVAKRFFGLQDMLNFDKASKTVEWLLNQAKVEINRLVKEKKKNDHHHQSCSSASSECEEGVSSLDEVVVSRDQEQQQQQQQEKVEKVVKRRVKNSRKISAFDPLAKECRERARERARERTREKMRSRGVLAEESKQCGEETNQDLIQLGSSNPFETGDQESGAKTSHSVDVHPSSLDVIATEAKEQSYRAVKEHNDDDDDSLVVLSKWSPSLIFNNSGFSQDHQFAEFQSLGKPWET

SEQ ID NO: 388 - protein, 385 aa, Glycine max; identical to SEQ ID NO: 387

SEQ ID NO: 389 - protein, 380 aa, Glycine max
MYSSNTFLNGNDLISYPNQPFCFRPFSFESNPTYNFSKEEANSNYALPPPPPPPPLSFFQSPFDENIFLEHHHHDLLLLHQYSLTDSGVSKNLEVVAEISPIPCPEQGGIAMEHTPRKRSSKRDRHSKINTARGLRDRRMRLSLEVAKRFFGLQDMLGFDKASKTVEWLLNQAKGEIKQLAREKTSVVGGGGKSASSTSECEGVSSLDEVAVSTGGVNNEEQERETVPNMMKRRKSKVCRKSAFNAIDKESREKARERARERTREKMRTRRVLVSDASNLNRLSSWNPFETVEDSAGTTHHPSLDVHLHEADQEPISSHNVKEHNLGEDMAHEDNSLALMNKWSPTMLFNSLHNSGILQEHQFAEFQSLGKQWEAYSNQI

SEQ ID NO: 390 - protein, 459 aa, Glycine max
MEDSSGHLNIPPAAAAATLRHVDRMINSNHYTSPSRTIYSDRFIPSRSASKFALFDIAWPPGGGDDSSSAYTTLLRTALFGPDIEPPHSPAMTLPSRNIFRYKTETRQSMHSHSPFLCDDSVPGVVHGPVKAPRKVPRSPFKVLDAPALQDDFYLNLVDWSSHNVLAVGLGNCVYLWNACSSKVTKLCDLGIDDLVCSVGWAQRGTHLAVGTSNGKVQIWDASRCKKIRSMEGHRLRVGTLAWSSSLLSSGGRDKNIYQRDIRAQEDFVSKLSGHKSEVCGLKWSYDNRELASGGNDNRLFVWNQHSTQPVLKYCEHTAAVKAIAWSPHLHGLLASGGGTADRCIRFWNTTTNSHLSCMDTGSQVCNLVWSKNVNELVSTHGYSQNQIIVWRYPSMSKLATLTGHTYRVLYLAISPDGQTIVTGAGDETLRFWNVFPSPKSQNTDSEIGASSFGRTIIR

SEQ ID NO: 391 - protein, 526 aa, Glycine max
MLKAIRHNLNLTQKLPSPHILKTKKHKTEKTAATFTAFFPGKIITASAAVRSFSDRATGTAMEDLSGHLNIPPAASAATLRHVDRMINSNHYTSPSRTIYSDRFIPSRSASKFALFNIASPPEGRDDSSSAYTTLLRTALFGPDFAPPPTPEKTASPAMTLPSRNIFRYKTETRQSMHSLSPFMCEDSVPGVVHGPVKAPRKVPRSPFKVLDAPALQDDFYLNLVDWSSHNVLAVGLGNCVYLWNACSSKVTKLCDLGIDDLVCSVGWAQRGTHLAVGTSNGKVQIWDASRCKKIRSLEGHRLRVGALAWSSSLLSSGGRDKNIYQRDIRAQEDFVSKLSGHKSEVCGLKWSYDNRELASGGNDNRLFVWNQHSTQPVLKYCEHTAAVKAIAWSPHLHGLLASGGGTADRCIRFWNTTTNSHLSCMDTGSQVCNLVWSKNVNELVSTHGYSQNQIIVWRYPTMSKLATLTGHTYRVLYLAISPDGQTIVTGAGDETLRFWNVFPSPKSQNTDSEIGASSLGRTIIR

SEQ ID NO: 392 - protein, 459 aa, Glycine max
MDESFTPAPPPPPMSLSRHDHVQRMINSKRYKSPSKTIYSDRFIPSRSGSNFDLFNLPSPSSSEDSCSCSPYSTALRRALFGPDTPDKFESPNIFRYKTETRKSMYSLSPTPFTSQDDLLPGYDNNHKPPKRPRKIPPSSFKVLDAPALQDDFYLNLVDWSSNNILAVALENSVYLWNASSSKVTKLCDLGIDDSVCSVGWAPLGTYLSVGSNSGKVQIWDVSQGKSIRTMEGHRLRVGALAWSSSLLSSGGRDKSIYQRDIRAQEDFVSKLSGHKSEVCGLKWSYDNRELASGGNDNRLLVWNQKSTQPVLKFCEHTAAVKAIAWSPHVNGLLASGGGTVDRNIRFWNTTTNSQLNCIDTGSQVCNLVWSKNVNELVSTHGYSQNQIIVWKYPTMSKLATLTGHTYRVLYLAISPDGQTIVTGAGDETLRFWNVFPSRKSQNTESEIGASSFGRTIIR

SEQ ID NO: 393 - protein, 452 aa, Glycine max
MDESFTPMSSFQHDHVQRLIKSNRYKSPSKTIYSNRFIPSRSGSNFDFFNLPPSSSSEDSCSCSPYSTALRSALFGPDTPDKFESPNIFRYKTETRKSLYSLSPTPFTFQDDLLPGYDHNQKPPKRPRKIPPSSFKVLDAPALQDDFYLNLVDWSSNNVLAVALETSVYLWNASSSKVTKLCDLGIDNSVCSVGWAPLGTYLAVGSNSGKVQIWDVSQGKSIRTMEGHRLRVGALAWSSSLLSSGGRDKSIYQRDIRAQEDFISKLSGHKSEVCGLKWSCDNRELASGGNDNRLLVWNQKSTQPVLKFCEHTAAVKAIAWSPHVSGLLASGGGTADRNIRFWNTTTNTQLNCIDTGSQVCNLVWSKNVNELVSTHGYSQNQIIVWKYPTMSKLATLTGHTYRVLYLAISPDGQTIVSGAGDETLRFWDVFPLQKSRNTESEIGASFGRTIIR

SEQ ID NO: 394 - protein, 489 aa, Glycine max
MEAKKSGLNLPAGMSGTSLRLDTAAASSISTLNSPSSLRSISNLTSPSKSNSACSDRFIPCRSSSRLHTFGLLDRPSPVKEGSNEAYSRLLKSELFGSDFASPSLSLSSPAGAAPPSPLSPSKNMLRFKTDHSVAPSSPYSPSILGQQNAFPSDSSTPPPKPPRKVLKTPHKVLDAPSLQDDFYLNLVDWSTQNVLAVGLGTCVYLWSASNSKVTKLCDLGPYDGVCSVQWTREGSFISIGTNLGQVQVWDGTQCKKVRTMGGHQTRTGVLAWNSRILASGSRDRNILQHDMRIPGDFVSKLVGHKSEVCGLKWSSDDRELASGGNDNQLLVWNQHSQQPVLRLTEHTAAVKAIAWSPHQSSLLVSGGGTADRCIRFWNTTNGHQLNCLDTGSQVCNLAWSKNVNELVSTHGYSQNQIMVWKYPSLSKVATLTGHSMRVLYLAMSPDGQTIVTGAGDETLRFWNVFPSMKAPVPVKDTGLWSLGRTQIR

SEQ ID NO: 395 - protein, 500 aa, Glycine max
MESPHAKKSGGLKLPAGMSGTSLRLDTAPASSSFRSSISTLNSPSSLRSISNLTSPSKSNSACSDRFIPCRSSSRLHTFGLVDRPSPVKEGSNEAYSRLLKSELFGSDFASPSLSSLSSPAGAAAPPSPLSPSKNMLRFKTDHSAAPSSPYSPSILGQQNGFTSDSSTPPPKPPRKVPKTPHKVLDAPSLQDDFYLNLVDWSTQNVLAVGLGTCVYLWSASNSKVTKLCDLGPYDGVCSVQWTREGSFISIGTNLGQVQVWDGTQCKKVRTMGGHQTRTGVLAWNSRILASGSRDRNILQHDMRVPGDFVSKLVGHKSEVCGLKWSCDDRELASGGNDNQLLVWNQHSQQPVLRLTEHTAAVKAIAWSPHQSSLLVSGGGTADRCIRFWNTTNGHQLNCVDTGSQVCNLAWSKNVNELVSTHGYSQNQIMVWKYPSLTKVATLTGHSMRVLYLAMSPDGQTIVTGAGDETLRFWNVFPSMKAPAPVKDTGLWSLGRTQIR

SEQ ID NO: 396 - protein, 711 aa, Glycine max
MGDGSIVGHLPEEILLNVFSAVSDTRTRNALSLVSWSFYHLERKTRTSLTLRGNARDLHLIPTSFKHVTHLDLSFLSPWGHALFCSSSATVGHQSLLAQHLRAAFPRVTSLAIYARDPYTLRLLLLSAWPELSAVKLVRWHQRPPTSANEADFAELFKKCRSLASLDLSSFYHWTEDIPKVLAANPISAATLRRLNLLTTSLPEGFKAHEIESITASCPNLEHFLVVCTFHPRYIGFVSDDTLVAIPSNCPKLSLLHLADTSSFLNRREDEGFDGEDASVSRAALLTLFSGLPLLEELVLDVCKNVRESSFALEVLGSKCPNLRVLKLGQFQGICLAFGSRLDGIALCHGLQSLSVGNCADLDDMGLIEIARGCSRLVRFELQGCRLVTERGLRTMACLLARTLIDVKVSCCVNLDTAATLRALEPIRERIERLHVDCVWNGLKESDGLGHGFLNFDLNGLDEPGDGGELMDYFGGGECENATKRKRQRCEYEMGVHDSFLQSNGNGFCGKSWDKLQYLSLWIKVGDLLTPLPVAGLEDCPVLEEIRIKVEGDSRGQPKPAESEFGLSILACYPQLLKMQLDCGDTKGYALTAPSGQMDLSLWERFLLNGIGSLSLGELHYWPPQDEDVNQRSVSLPAAGLLQECYTLRKLFIHGTAHEHFMNFFLKIPNLRDVQLREDYYPAPENDMSTEMRVGSCSRFEDALNRRRICD

SEQ ID NO: 397 - protein, 433 aa, Glycine max
MEWNAKSLGQWDWEHLFFNTKAAENPRLQPTDCSSEADPEINVGLLYPSGGSACSGSELIHASSSRSSKSASNNSSSNGDSRESILTLEGSQDDSTGKKELCNGEPVETSPAAVPSPVSGEPLLTLKLGKRLYFEDVCTGSDSKKPSSFEVPILSGKKYKTSSQTVQHPSCQVEGCGLDLSSAKDYHRKHRVCEAHSKSPKVVIAGLERRFCQQCSRFHALSEFDDKKRSCRQRLSDHNARRRKTQPDSIQLNPSALSSSPYDGRQIMSPFAFSRTATNLAWQDMHSSKHPQTKEFLPKPAKAFNKIPSIVSMLSDDSSGLLTSRGIATKSIVPGMEVPNGTQDVNRALSLLSTNSSWCPYETKSLSLEHSTRTTHSITQHRLPLPSSEYWHTDQQNSSMCISFSDCDSSNRFQDFQLLSSPYESGFPCNQLD

SEQ ID NO: 398 - protein, 266 aa, Glycine max
MGTSILDALNVRVEGSGDKYLFLAHGFGTDQSAWQRVLPYFTRNYSVILYDLVCAGSVNPDHFDYRRYTTLDAYVDDLLNILDALRVPRCVYVGHSISAMIGMLASIRRPDLFSKLILIGASPRFLNDKDYHGGFEQGEIEQVFSAMEANYEAWVNGFAPLSVGADVPAAVREFSRTLFNMRPDISLFVSRTVFHSDLRGILGLVNVPCCIMQTARDMSVPASVATYMKDHIGGKSSIQWLDTEGHLPHLSAPSYLARQLEIALSQ

SEQ ID NO: 399 - protein, 548 aa, Glycine max
MVFMDYLEWLLPIPSVPSASAMFTLLALIGGLLVYLYAPYWGVRKVPGPPSLPLVGHLPLLAKYGPDVFSVLAKQYGPIYRFHMGRQPLIIIADAELCKEAGIKKFKDISNRSIPSPISASPLHQKGLFFSRDSQWSIMRNTILSMYQPSYLSRLVPTMQSFIESATQNLDSQKEDIIFSNLSLRLATDVIGHAAFGVNFGLSSPHSVCDSIKNVNVNNNNNNASASSSNSNDNEVSDFINQHIYSTTQLKMDLSGSLSIILGLLLPILQEPFRQILKRIPGTMDWKIEHTNQKLSGRLDEIVEKRMKDKTRSSKDFLSLILNARETKSVSENVFTPEYISAVTYEHLLAGSATTSFTLSSVVYLVAGHPEVEKKLLHEIDGFGPVDQIPTSQDLHDKFPYLDQVIKEAMRFYTVSPLVARETSNEVEIGGYLLPKGTWVWLALGVPAKDPRNFPEPDKFKPERFDPNFEEMKRRHPYAFIPFGIGPRACIGRQFSLQEIKLSLIHLYRKYLFRHSPNMENPLELQYGIVLNFKHGVKLRAIKRKEAC

SEQ ID NO: 400 - protein, 532 aa, Glycine max
MVSIVLEWLFPFPCVAMFTTLLMLIGGLLGYLYGPYWGLRKVPGPPTLPLVGHLPLLAKYGPDVFSLLAKQYGPIYRFHMGRQPLILVADPELCKEVGIKKFKDIPNRSIPSPISASPLHQKGLFFTRDSRWSTMRNTILSVYQPSHLASLVPTMQSFIESATQNLDTPNEDIIFSNLSLRLATDVIGEAAFGVNFGLSKPHSVCESIKSVSVNNVRNDDDEVSDFINQHIYSTTQLKMDLSGSFSIILGLLAPILQEPFRQILKRIPGTMDSKIESTNEKLSGPLDEIVKRRMEDKNRTSKNFLSLILNARESKKVSENVFSPDYISAVTYEHLLAGSATTAFTLSSIVYLVAGHREVEKKLLQEIDGFGPPDRIPTAQDLHDSFPYLDQVIKEAMRFYTVSPLVARETSNEVEIGGYLLPKGTWVWLALGVLAKDPRNFPEPEKFKPERFDPKCEEMKRRHPYAFIPFGIGPRACIGQKFSLQEIKLTLIHLYQKYVFRHSVDMEKPVEMEYGMVLNFKHGIKLRVIRRT

SEQ ID NO: 401 - protein, 458 aa, Glycine max
MGRQPLILVADPELCKKVGIKQFKDIPNRSIPSPISASPLHQKGLFFTRDSRWSAMRNTILSVYQPSHLASLVPMMQSFIESATQNLDTPNEDIIFSNLSLRLATDVIGEAAFGVNFGLSKPISVCESIKSVSVNNVRNDDNDNGDDEVSDFINQHIYSTAQLKMDLSGSFSIILGLLAPILQEPFRQILKRIPGTMDRKIESTNEKLSGRLDEIVKRRMENKNRTSKNFLSLILNARESKKVSENVFSPDYVSAVTYEHLLAGSATTAFTLSSIVYLVAGHIEVEKKLLQEIDGFGTPDRIPIAQDLHDSFPYLDQVIKEAMRFYTVSPLVAREASNEVEIGGYLLPKGTWVWLALGVLAKDPRNFPEPEKFKPERFDPKCEEMKRRHPYAFIPFGIGPRACIGQKFSLQEIKLSLIHLYRKYVFRHSLDMENPVEMEYGMVLNFKHGLKLRVIRRT

SEQ ID NO: 402 - protein, 256 aa, Glycine max
MEAKLVAQCKSPTLSLAHRKPKHPCVVVGVLARPVDEISGEARKTNHVYKDGLFDRITINYLSKCVQEATGLRNNKSGYESLVDAATVASQRFSPVEQHQLVIQSLDRAFPKPMLLLIRKLLPPSKFARKLFAVFTTLFFAWLVGPSEVRESEVEGRRERNVVHIKKCRWGRLPRFLEGTNCVGMCINLCKLPSQSFIKDSLGISVNMVPNFDDMSCEMIFGQDPPESTDDPALKQPCFKLCKAKRSHGTNCLVIN

SEQ ID NO: 403 - protein, 249 aa, Glycine max
MEAKLVAQCNSPTLTLAHWKLKQPCVVGVLARPADDISGEARKTNHVYKDGLFDRIAINYLSKCVQEATGLKNSKSGYESLVEAATLASQRFSPIEQHQLVIQSLDRAFPKPMLLLIRTLLPPSKFARKLFAIFTTLFFAWLVGPSEVRESEVEGRRERNVVHIKKCRFLEETNCVGMCINLCKLPSQSFIKDSLGMSVNMVPNFDDMSCEMIFGEDPPESTDDPALNQPCFKLCKAKRSHGTNCLVIN

SEQ ID NO: 404 - protein, 77 aa, Glycine max
MVNPSKSTSPIYLIPRFPGKNNGKERDWRVPVEAPSQLWLLHVGNAFEVRHPHRNLDIQIQAAACSYQWFNFSKLFG

SEQ ID NO: 405 - protein, 614 aa, Glycine max
MQTKPIHNTPTYIPPPIRPSPPVHQPPPSIPPTKPRAVSISAPNTPVAVPIPPIVEPDDSNAAYYDYQFLFISQRSETSQPVTLSTVEGVIPADFPSGTYYLTGPGLLADDHGSTVHPLDGHGYLRAFTFDNATKNVKYMAKYIKTDAHVEEHDPKTDKWKFTHRGPFSVLKGGKKVGNTKVMKNVANTSVLKWGEKLLCMWEGGEPYEIQAGTLDTIGRYNMMDGADLENHDESKDGVDVWEVAANLLKPILYGVFKMPPRRLLSHYKVDSRRNRLLTVSCNAEDMLLPRSNFTFAEYDSNFNVVQKQVFRIPDHLMIHDWAVTDTHYIVFANRIKLDVLGSIAAVYGMSPMVSALRVNPSKSTSPIYLIPRFPDKNKDKERDWRVPFEAPSQLWLLHVGNAFEIRYPHRNLDIQIQAAACSYQWFNFSKLFGYDWQKKKLDPSIMNVKGGNELLPHLVQVSIKLDSDYNCQECDVKPMKKWQKSSDFPATNPTFSGKKNKYLYAATTLGSRKTLPCFPFDTVVKLDLESDNSAQTWTAGSRRFIGEPIFVPKGDEEDDGYLLVVEYAVSMNRCYLVILDPKRIGADNALIARIEIPSHLNFPLGFHGFWAAN

SEQ ID NO: 406 - protein, 563 aa, Glycine max
MAFTFSPSIRNSISWPTMLVPDMPDINISLRNKGIYKGKRNINLRDLTKANVASPSLPLIAPPTPEERPGITHDCHHHHHVAWTSIPQERWEGELQVQGQIPLWLEGTYLRNGPGMWHIGDYNFRHLFDGYATLVRLGFRNGRLVAGHRQIESEAYRAAKKNKKICYREFSEVPKAANFLAYVGELASLFSGASLTDNANTGVVKLGDGRVVCLTETQKGSIVIDPETLETVGKFEYSDSLGGLIHSAHPIVTDEEFLTLLPDLVRAGYLVVRMEPGTNERRVIGRVNCRGGPAPGWVHSFPVTQHYVVVPEMPLRYCAQNLLKAEPTPLYKFEWHPESRAFMHVMCKTSGKIVASVEVPLFVTFHFINAYEEQDEDGRVTAIIADCCEHNSDTTILDRLRLQNLRSFNGEDVLPDARVGRFRIPLDGSPYGTLDAALEPNEHGRGMDMCSINPNYLGKKYRYAYACGAQRPCNFPNTLTKLDFELKKAKNWHEEGAVPSEPFFVARPGATEEDDGVVISIVSEKNGEGFALVLDGSTFEEIARAKFPYGLPYGLHGCWVPKE

SEQ ID NO: 407 - protein, 388 aa, Oryza Sativa
MLPFFDSPSPMDIPLYQQLQLTPPSPKPDHHHHHHSTFFYYHHHPPPSPSFPSFPSPAAATIASPSPAMHPFMDLELEPHGQQLAAAEEDGAGGQGVDAGVPFGVDGAAAAAAARKDRHSKISTAGGMRDRRMRLSLDVARKFFALQDMLGFDKASKTVQWLLNMSKAAIREIMSDDASSVCEEDGSSSLSVDGKQQQHSNPADRGGGAGDHKGAAHGHSDGKKPAKPRRAAANPKPPRRLANAHPVPDKESRAKARERARERTKEKNRMRWVTLASAISVEAATAAAAAGEDKSPTSPSNNLNHSSSTNLVSTELEDGSSSTRHNGVGVSGGRMQEISAASEASDVIMAFANGGAYGDSGSYYLQQQHQQDQWELGGVVYANSRHYC

SEQ ID NO: 408 - protein, 258 aa, Oryza Sativa
MQQQLDQQQQQQQHQYDHFFSGHGQFNSETLEAVLCRPPRGAAADPAVPAAAAAAAVLTAARNGGGGHGRARKRPFRTDRHSKIRTAQGVRDRRMRLSLDVARDFFALQDRLGFDKASKTVDWLLTQSKPAIDRLAADPSSSSHRAAGDTRMSSAERGGDHHMVAVGAAGSGKGDADKARGPRGGRSAPMELGCELGRLVPAPVLGEYYYELAEMMSNNTGGEGDDDGDYDDDGDFLDDSGFLCHYRSKKKFSIKDIS

SEQ ID NO: 409 - protein, 516 aa, Oryza Sativa
MDISEVLGATAEWAVTLVAMAVGLLVVAYLYEPYRKVWHVPGPVPLPLIGHLHLLAMHGPDVFSVLARKHGPVFRFHMGRQPLIIVADAELCKEVGVKKFKSIPNRSMPSPIANSPIHKKGLFFIRGPRWTSMRNMIISIYQPSHLASLIPTMESCIQRASKNLDGQKEITFSDLSLSLATDVIGLAAFGTDFGLSKLPVTPDDSNIDKIAADTSVEAKASSEFIKMHMHATTSLKMDLSGSLSILVGMLLPFLQEPFRQVLKRIPGMGDYKIDRVNRALKTHMDSIVAEREAAMEHDLAASQQRKDFLSVVLTARESNKSSRELLTPDYISALTYEHLLAGSTTTAFTLSTVLYLVAKHPEVEEKLLKEIDAFGPRYCVPMADDLQTKFPYLDQVVKESMRFYIMSPLLARETLEQVEIGGYVLPKGTWVWLAPGVLAKDPKNFPEPEIFRPERFDPNGEEERRRHPYAFIPFGIGPRVCIGQKFSIQEIKLSMIHLYRHYVFRHSPSMESPLEF

SEQ ID NO: 410 - protein, 720 aa, Oryza Sativa
MAEEEEVEEGRSSSSAILDLPEPLLLHILSFLTDVRSRHRAALACGRMRAAERATRSELSLRGDPRSPGFLFLSHAFRFPALEHLDLSLVSPWGHPLLSSVPPCGGGGGGAPSASSSSGMNVYHPEAISEQNAFIAARLAGCFPAVTSLAVYCRDPTTLANLTPHWQASLRRVKLVRWHQRPPTLPDGADLEPLLETCAALRELDLSEFYCWTEDVVRALTTHPSATAALTHLDLGLAAATDGFKSSELGPIAASCPNLRKLVAPCLFNPRFSDCVGDDALLSLATSCPRLTVLRLSEPFEAAANIQREEAAITVAGLVAFFAALPALEDFTMDLQHNVLEAAPAMEALARRCPRIKFLTLGSFQGLCKASWLHLDGVAVCGGLESLYMKNCQDLTDASLAAIGRGCRRLAKFGIHGCDLVTSAGIRRLAFTLRPTLKEVTVLHCRLLHTAECLTALSPIRDRIESLEINCVWNTTEQPCSVANGTTTECDPEDDELGEVYESAAKKCRYMEFDDLGSWEMLRSLSLWFSAGQLLSPLISAGLDSCPVLEEISIKVEGDCRTCPRPAPRTIFGLSDLAGFPVLAKMKLDLSEAVGYALTAPTGQMDLSLWERFYLHGIESLQTLYELDYWPPQDKDVHHRSLTLPAVGLIQRCVGLRKLFIHGTTHEHFMTFFLSIPNLRDMQLREDYYPAPENDLMFTEMRAESWLRFEVQLNSRQIDD

SEQ ID NO: 411 - protein, 609 aa, Oryza Sativa
MATQAIAPMHAAVVHRHHVLPPRRCVRRRGVFVRASAAAAAAAAETDTLSAAFWDYNLLFRSQRDECLDSIPLRVTEGAIPPDFPAGTYYLAGPGIFSDDHGSTVHPLDGHGYLRSFRFRPGDRTIHYSARFVETAAKREESRDGASWRFTHRGPFSVLQGGKKVGNVKVMKNVANTSVLRWGGRLLCLWEGGQPYEVDPRTLETVGPFDLLGLAAADDNKATNASAARRPWLQEAGLDAAARLLRPVLSGVFDMPGKRLLAHYKIDPRRGRLLMVACNAEDMLLPRSHFTFYEFDAHFDLVQKREFVVPDHLMIHDWAFTDTHYILLGNRIKLDIPGSLLALTGTHPMIAALAVDPRRQSTPVYLLPRSPETEAGGRDWSVPIEAPSQMWSVHVGNAFEEANRRGGLDVRLHMSSCSYQWFHFHRMFGYNWHHKKLDPSFMNAAKGKEWLPRLVQVAIELDRTGECRRCSVRRLSDQHARPADFPAINPSYANQRNRFVYAGAASGSRRFLPYFPFDSVVKVDVSDGSARWWSTDGRKFVGEPVFVPTGGGEDGGYVLLVEYAVSKHRCHLVVLDAKKIGTENALVAKLEVPKNLTFPMGFHGFWGDE

SEQ ID NO: 412 - protein, 801 aa, Oryza Sativa
MSPAMLQASSLCVSAALSGAASRPGRLASQGHQGKRAVAQPLAASAVTEAAPPAPVVAPPARPVDAPRRRGGRGGGGGGGELVAWKSVRQERWEGALEVDGELPLWLDGTYLRNGPGLWNLGDYGFRHLFDGYATLVRVSFRGGRAVGAHRQIESEAYKAARAHGKVCYREFSEVPKPDNFLSYVGQLATLFSGSSLTDNSNTGVVMLGDGRVLCLTETIKGSIQVDPDTLDTVGKFQYTDKLGGLIHSAHPIVTDTEFWTLIPDLIRPGYVVARMDAGSNERQFVGRVDCRGGPAPGWVHSFPVTEHYVVVPEMPLRYCAKNLLRAEPTPLYKFEWHLESGSYMHVMCKASGKIVASVEVPPFVTFHFINAYEETDEEGRVTAIIADCCEHNANTAILDKLRLHNLRSSSGQDVLPDARVGRFRIPLDGSQFGELETALDPEEHGRGMDMCSINPAHVGREYRYAYACGARRPCNFPNTLTKVDLVERTAKNWHEEGSVPSEPFFVPRPGATEEDDGVAISMVSAKDGSGYALVLDGKTFEEVARAKFPCEEKPIRHLSSAEDHRKVIAGHLLRRSSLLSDVPEESVFVEEAPGLEWYISGLEIDLYSRWLANPVVVPKANGKLRMCIDYTDLNKACPKDPFPLPRIDQIVDSTTGCDLLCFLDAYSGYHQICMAREDEEKTAFITPVGTFCYTTMPFGLKNAGPTFQRMTRITLSNQIGCNIEAYVDDLVVKTRHQDTLLQDLAETFDSIRSTRVKLNPDKCVFGVPADKLLGFLVSSRGIEANPEKICAIERMRPQQA

SEQ ID NO: 413 - protein, 215 aa, Brassica napus
MAGGGPTFSIELSAYGSDLPTDKASGDIPNEEGSGLSRVGSGIWSGRTVDYSSESSSSIGTPGDSEEEDEESEEDNDEEELGLASLRSLEDSLPSKGLSSHYKGKSKSFGNLGEIGSVKEVPKQENPLNKKRRLQIYNKLARKSFYSWQNPKSMPLLPVHEDNDDEEGDDGDLSDEERGGDVLARRPSFKNRALKSMSCFALSDLQEEEEEEEDE

SEQ ID NO: 414 - protein, 299 aa, Brassica napus
MESVAVTWSREEEKSFENAIAIHCVEEEITEEQWSKMASTVPTKTLEQVKKHYQILLEDVKAIENGQVPLPRYHRTGDEAAEASPPNRDCHSSGGSGSPEKKPNHGVSGTNGGGRSSSRHEQERRKGIPWTEEEHRLFLLGLEKFGKGDWRSISRNFVITRTPTQVASHAQKYFIRLNSMNRDRRRSSIHDITSVNNQAPAVTGQQQQVAKPRPAQPQPHHPTMAGVGMYGSAPVGQPIIAPPDHMGSAVGTPVMLPPPMGAHHHHHHHPHHLGVAPYALPAYPVPPIPQQHPTPSTMH

SEQ ID NO: 415 - protein, 511 aa, Brassica napus
MDGSGGGRGGGVESILPNYKLGRTLGIGSFGRVKIAEHSLTGHKVAIKILNRRKIKNMEMEEKVRREIKILRLFMHPHIIRLYEVIETPTDIYLVMEYVNSGELFDYIVEKGRLQEDEARNFFQQIISGVEYCHRNMVVHRDLKPENLLLDSKCNVKIADFGLSNIMRDGHFLKTSCGSPNYAAPEVISGKLYAGPEVDVWSCGVILYALLCGTLPFDDENIPNLFKKIKGGIYTLPSHLSGGARDLIPRMLVVDPMKRVTIPEIRQHNWFQAHLPRYLAVPPPDTVQQAKKIDEEILQEVINMGFDRNLLIESLRNRTQNDGTVTYYLILDNRFRVSAGYLGAEFQETMEGTPRMHPAESVASPVSHRLPGLMELQGVGLRSQYPVERKWALGLQSRAHPREIMTEVLKALQDLSVCWKKIGPYNMKCRWVPNNADGMLSNSMHDNNYFGDDSSIVENDAAVKSPNVVKFEIQLYKTRDDKYLLDLQRVHGPQFLFLDLCAAFLAQLRVL

SEQ ID NO: 416 - protein, 259 aa, Oryza Sativa
MSTAVADVPPAAAYGFPGSAKRGKPEEVVVLMGKRRNEGFFIEEEEEEEEVLTESSSIGAPSPASSSIGENSGEEEGGDDEEEVESKLKAEDEQVGLGCLDALEESLPIKRGLSNFYAGKSKSFTSLAEATASPAAAANELAKPENPFNKRRRILATWSRRASCSSLATATYLPPLLAPDHAVAEGDEGEEEDDDSDDDERQHRGKNGGRRESAAPPLPLPPPRLTLHTQMGGMVRRNGTFRSPRSLSLSDLQNSGGSC

SEQ ID NO: 417 - protein, 235 aa, Oryza Sativa
MHMGKRGELNLDTCLCLPKSGVQKYTGDKQPFAPGRMREACAPVPPGAHEEACIEQSDDRSEDGSFSGSSIGSSCSSASDLSDDGSSYRPGDYLEPSSSSSSASSSTLQLDSEGPLCDLSSLIAQLPIRRGLSNYYQGKSQSFTSISDATCVQDLAKKITYNKRMKACKSYAAGLDMNQRSNHLPKPCNKMIAKRPSKGSFTCLLSRPSSTSLLCSSAKPPTHQSKKDVQMHINS

SEQ ID NO: 418 - protein, 261 aa, Oryza Sativa
MSTAVARGGMMPAGHGFGKGKAAAVEEEEDEVNGFFVEEEEEEEEEEEAAVSDASSIGAASSDSSSIGENSSSEKEGEEEGEEVESKAKEVAVEVEGGGLGFHGLGTLESLEDALPIKRGLSNFYAGKSKSFTSLAEAAAKAAAKEIAKPENPFNKRRRVLAAWSRRRASCSSLATTYLPPLLAPDHAVVEEEDEEDDSDAEQCSGSGGGNRRREPTFPPPRLSLHAQKSSLTPRSSNPASSFRSPRSFSLSDLQNAGSYN

SEQ ID NO: 419 - protein, 232 aa, Oryza Sativa
MPVDVGRAAAREAAMPAACSSSSIGKDSDECSPPGKEEEEGEEVQSAFVGGGGGLAGLEALEEALPIRRSISKFYNGKSKSFACLKEAVSSCGSAKDIAKAESAYSRKRKNLLAYSIMYETSQETAAEVYETGPPKRLASLSRNSLVTLASSSSRSSSSISIEETELTEQLHSPPSLANDENSAVYNAPALQLGSCDPKTSSVPVRSFSMMDLRRLHRPRSSCRLKDQKTTE

SEQ ID NO: 420 - protein, 149 aa, Oryza Sativa
MEEVASERMAAVAMTVTWAWRCRSEGRCTASTPPPTKKLTTATAGMPNPHPHQRADVDGRDAQRGRDEVVEVEDPAALVDEAAAAASSRKGKATAVEEEEVNGFFVEEEVGAVSNASSIGVASSDSSTGELVIGEGGAFSSLQATFQRK

SEQ ID NO: 421 - protein, 257 aa, Oryza Sativa
MSIALESGPGLGGGGGGGGGPRFGRVARCAYAASPPPASVGARSSSSVGRDSDSPAAAAKWEWDGEEVEGGDGEVQSSYKGPFDTMDALQEALPFRKGVCKFYNGKSGSFAKLQDSVIPSPPEKSLPKPENPSPRKRKGLLPFSFKWGKPQNKEVFPEDDVIISPTNCRRMTLSPAATSSSGSNSGSDDEHYRSPKLHTRQPLRRPSNAAMGVFASPPAPRPPQVLSAHMRSHSMLDLQDVTESTAMVSPRDKRRRN

SEQ ID NO: 422 - protein, 240 aa, Oryza Sativa
MDRYGEKQQQQQMFASYVDASLLAASGEVQGERPRARRRRRRGARCVGGGGGGGEVDGGDPKKRRLSDEQVEMLELSFREERKLETGRKVHLASELGLDPKQVAVWFQNRRARHKSKLLEEEFSKLKHAHDAAILHKCHLENEVLRLKERLVVAEEEVRRLRSAAGSHTASGEGGDIMGLGGSGACVAGSPSSSFSTGTCQPPSFGGGDHLGDDDLVYVPEYGGYADNSVVEWFSLYGLI

SEQ ID NO: 423 - protein, 497 aa, Oryza Sativa
MGKAARWFRNMWGGGRKEQKGEAPASGGKRWSFGKSSRDSAEAAAAAAAAAAEASGGNAAIARAAEAAWLRSVYADTEREQSKHAIAVAAATAAAADAAVAAAQAAVAVVRLTSKGRSAPVLAATVAGDTRSLAAAAVRIQTAFRGFLAKKALRALKALVKLQALVRGYLVRRQAAATLQSMQALVRAQATVRAHRSGAGAAANLPHLHHAPFWPRRSLVRRWLNLADDIAMYMFDVDVVCWRWMQQERCAGDDTRSEHGVAAYSRRLSASIESSSYGYDRSPKIVEVDTGRPKSRSSSSRRASSPLLLDAAGCASGGEDWCANSMSSPLPCYLPGGAPPPRIAVPTSRHFPDYDWCALEKARPATAQSTPRYAHAPPTPTKSVCGGGGGGGIHSSPLNCPNYMSNTQSFEAKVRSQSAPKQRPETGGAGAGGGRKRVPLSEVVVVESRASLSGVGMQRSCNRVQEAFNFKTAVVGRLDRSSESGENDRHAFLQRRW

SEQ ID NO: 424 - protein, 306 aa, Oryza Sativa
MTSQAATTTTTAAAAAAWTREDDKAFENALAACAAPPPADGGAPDDDWFAALAASVPGARSAEEVRRHYEALVEDVAAIDAGRVPLPRYAGEESAAPPDGAGAAAAASKDGGHRRDERKGGGGGYDGGKSCSKAEQERRKGIPWTEEEHRLFLLGLDKFGKGDWRSISRNFVISRTPTQVASHAQKYFIRLNSMNRDRRRSSIHDITSVTAGDQVAAQQGAPITGHQATGNPAAAALGPPGMKHHHHHHPGGAPPPMPMYSAAPMGHPVAGHMVPAAVGTPVVFPPGHAPYVVPVGYPAPPAKMHQ

SEQ ID NO: 425 - protein, 455 aa, Oryza Sativa
MEWDLKMPPAASWELADELENSGGGGVPAAVSSSSAAVGGGVNAGGGGRQECSVDLKLGGLGEFGGGGAQPRVAVAGEPAKGKGPAAAATGAAAAASSAPAKRPRGAAAAGQQQCPSCAVDGCKEDLSKCRDYHRRHKVCEAHSKTPLVVVSGREMRFCQQCSRFHLLQEFDEAKRSCRKRLDGHNRRRRKPQPDPMNSASYLASQQGARFSPFATPRPEASWTGMIKTEESPYYTHHQIPLGISSRQQHFVGSTSDGGRRFPFLQEGEISFGTGAGAGGVPMDQAAAAAAASVCQPLLKTVAPPPPPHGGGGSGGGKMFSDGGLTQVLDSDCALSLLSAPANSTAIDVGGGRVVVQPTEHIPMAQPLISGLQFGGGGGSSAWFAARPHHQAATGAAATAVVVSTAGFSCPVVESEQLNTVLSSNDNEMNYNGMFHVGGEGSSDGTSSSLPFSWQ

SEQ ID NO: 426 - protein, 511 aa, Brassica napus
MDGSGGGRGGGVESILPNYKLGRTLGIGSFGRVKIAEHSLTGHKVAIKILNRRKIKNMEMEEKVRREIKILRLFMHPHIIRLYEVIETPTDIYLVMEYVNSGELFDYIVEKGRLQEDEARNFFQQIISGVEYCHRNMVVHRDLKPENLLLDSKCNVKIADFGLSNIMRDGHFLKTSCGSPNYAAPEVISGKLYAGPEVDVWSCGVILYALLCGTLPFDDENIPNLFKKIKGGIYTLPSHLSGGARDLIPRMLVVDPMKRVTIPEIRQHTWFQAHLPRYLAVPPPDTVQQAKKIDEEILQEVINMGFDRNLLIESLRNRTQNDGTVTYYLILDNRFRVSAGYLGAEFQETMEGTPRMHPAESVASPVSHRLPGLMEFQGVGLRSQYPVERKWALGLQSRAHPREIMTEVLKALQDLSVCWKKIGPYNMKCRWVPNNSDGMLSNSMHDNNYFGDDSSIVENDAAVKSPNVVKFEIQLYKTRDDKYLLDLQRVHGPQFLFLDLCAAFLAQLRVL

SEQ ID NO: 427 - protein, 513 aa, Brassica napus
MDPSSNRFGSTGVESILPNYKLGKTLGIGSFGKVKIAEHLLTGHKVAIKILNRRKIKNMQMEDKVRREIKILRLFMHPHIIRQYEVIETPSDIYVVMEYVKSGELFDYIVEKGRLQEDEGRNFFQQQIISGVEYCHRNMVVHRDLKPENLLLDSRCNIKIADFGLSNVMRDGHFLKTSCGSPNYAAPEVISGKLYAGPEVDVWSCGVILYALLCGTLPFDDENIPNLFKKIKGGIYTLPSHLSSDARDLIPRMLVVDPVKRITIPEIRQHRWFQTHLPRYLAVSPPDTVEQAKKINEEIVQEVVNMGFDRNQVMESLRNRVQNDATVTYYLLLDNRFRVPSGYLESEFQETTDNGSSPMRPAEAAASPVGHWVPTHMDQYGLGARSHVPADRKWALGLQSHAHPREIMNEVLKALQELNVCWKKIGHYNMKCRWVPGFSDGQNTMGNDQIHFRDESSIIEDDCAMTSLTVIKFELQLYKAREEKYLLDIQRVNGPQFLFLDLCAAFLTELRVI

SEQ ID NO: 428 - protein, 321 aa, Brassica napus
MGNANGKEDDAVSGVDGDATSSSARSNGGDPSVHSRQRRPPSTDSMSSSPPGSPARSPSPFLFAPQLSLLCHLTSNAIGSTMRHFFHCLGLTCVHNDCISCQMVPVAPLQRANAPPSPNKIHWNQSQRVFDHLEEPGIPIIITWNQGGNDVAVEGSWDSWRSRKKLQKSGKDHSILLVLPSGIYHYKVIVDGECKHIPDLPFVSDEMGNVCNIIDVHNFVPENPESIVEFEAPPSPDHSYGQALPTAEDYTKDPLAVPPQLHLTLLGKSEETAVAKKPQHVVLNHVFIEQGWTPQSIVALGLTHRFESKYITVVLYKPLTR

SEQ ID NO: 429 - protein, 288 aa, Brassica napus
MGNVNAREKEEEEEEEANSNNHNDAATRSHQGSDFTPSEQLMGGHHHHQSPPHSPRATQSPLMFAPQVPVIPLQRPEEIHIPNPSWMMQSPYEEASNEQGIPTMITWCHGGKEISVEGSWDNWKSRSRLQRSGKDFTIMKVLPSGVYEYRFIVDGQWMHAPELPFARDDAGNTFNLLDLQDYVPEDIQSISGFEPPQSPEASYSSLLLGAEDYSKEPPLVPPHLQMTLLNLPPANPDVPSPLPRPQHVVLNHLYMHKGKSGPSVVALGSTNRFLAKYVTVVLYKSLQR

SEQ ID NO: 430 - protein, 154 aa, Brassica napus
MESSSSGTNSSAIQTSSRSEENLMEQRKRKRMLSNRESARRSRMKKQKLLDDLTAQVNQLKKENSEIVTSVSITTQHYLAVEAENSVLRAQLDELSHRLESLNDIIGFLENTNGVCPNPLTCPESDDFLVNQMNMNMFHMMNQPLMASSDALLY

SEQ ID NO: 431 - protein, 514 aa, Glycine max
MDGPAGRGGAGLDMFLPNYKLGKTLGIGSFGKVKIAEHVLTGHKVAIKILNRRKIKNMEMEEKVRREIKILRLFMHPHIIRLYEVIETPTDIYVVMEYVKSGELFDYIVEKGRLQEDEARNFFQQIISGVEYCHRNMVVHRDLKPENLLLDSKCNVKIADFGLSNIMRDGHFLKTSCGSPNYAAPEVISGKLYAGPEVDVWSCGVILYALLCGTLPFDDENIPNLFKKIKGGIYTLPSHLSPGARDLIPGMLVVDPMRRMTIPEIRQHPWFQARLPRYLAVPPPDTMQQAKKIDEEILQEVVKMGFDRNQLVESLGNRIQNEGTVAYYLLLDNRFRVSSGYLGAEFQETMDSGFNQMHSSELASSVVGNRFPGYMEYPGVGSRQQFPVERKWALGLQSRAHPREIMTEVLKALQELNVCWKKIGHYNMKCRWVAGIPGHHEGMVNNNVHSNHYFGDDSNIIENDAVSTSNVVKFEVQLYKTREEKYLLDLQRVQGPQFLFLDLCAAFLAQLRVL

SEQ ID NO: 432 - protein, 515 aa, Glycine max
MDRSTGRGGGGSVDMFLRNYKLGKTLGIGSFGKVKIAEHVRTGHKVAIKILNRHKIKNMEMEEKVRREIKILRLFMHHHIIRLYEVVETPTDIYVVMEYVKSGELFDYIVEKGRLQEDEARHFFQQIISGVEYCHRNMVVHRDLKPENLLLDSKFNIKIADFGLSNIMRDGHFLKTSCGSPNYAAPEVISGKLYAGPEVDVWSCGVILYALLCGTLPFDDENIPNLFKKIKGGIYTLPSHLSPGARDLIPRMLVVDPMKRMTIPEIRQHPWFQVHLPRYLAVPPPDTLQQAKKIDEEILQEVVNMGFDRNQLVESLSNRIQNEGTVTYYLLLDNRFRVSSGYLGAEFQETMDSGFNRMHSGEVASPVVGHHSTGYMDYQGVGMRQQFPVERKWALGLQSRAQPREIMTEVLKALQELNVCWKKIGHYNMKCRWVAGTAGHHEGMINNSLHSNHYFGNDSGIIENEAVSKSNVVKFEVQLYKTREEKYLLDLQRVQGPQFLFLDLCAAFLSQLRVL

SEQ ID NO: 433 - protein, 510 aa, Glycine max
MDGPAGRGGAGLDMFLPNYKLGKTLGIGSFGKVKIAEHVLTGHKVAIKILNRRKIKNMEMEEKVRREIKILRLFMHPHIIRLYEVIETPTDIYFVMEYVKSGELFDYIVEKGRLQEDEARNFFQQIISGVEYCHRNMVVHRDLKPENLLLDSKCNVKIADFGLSNIMRDGHFLKTSCGSPNYAAPEVISGKLYAGPEVDVWSCGVILYALLCGTLPFDDENIPNLFKKIKGGIYTLPSHLSPNARDLIPGMLVVDPMRRMTIPEIRQHPWFQARLPRYLAVPPPDTMQQAKKIDEEILQEVVKMGFDRNQLVESLGNRIQNEGTVAYYLLLDNRFRVSSGYLGAEFQETMDSGFNQMQNSSVVGNRFPGYLEYPGVGSRQQFPVERKWALGLQSRAHPREIMTEVLKALQELNVCWKKIGHYNMKCRWVAGIPGHHEGMVNNNVDNNNFFGDDSNIIENDAVSTSNVVKFEVQLYKAREEKYLLDLQRVQGPQFLFLDLCAAFLAQLRVL

SEQ ID NO: 434 - protein, 284 aa, Glycine max
MGNANGREDGSIPGPADPSVADPAARGTHAPDSRPPVRAFSSDSMANSPPQSPRRSRSPILFGPQVPLAPLQRGNGPPFLNQMWQNESHGIVNQLPEQGIPVMITWNYGGNNVAVEGSWDNWTSRKALQRSGKDHSILIVLPPGIYHYRFIVDGEERFTPELPNVADEMGHVCNLLDVNDYVPENPDGVSEFEAPPSPESSYGQAFPAEEDFAKEPMAVPSQLHLTVLGMEKSDIGSSSKPQHVVLNHVFIEKNLALKSVVALGLTHRFQSKYVTVVLYKPLKR

SEQ ID NO: 435 - protein, 292 aa, Glycine max
MGNVNGRDDVNGTPSGTEGEEEEAGEEGGSDSVADCMSSNPGHRAPSELMGHSPPASPRATQSPFMFTPQVPVVPLQKPDEMHAPSPSWMQTTSGYEDMYCELGIPTMITWSYDGKEVAVEGSWDNWKTRMALQRSGKDFTIMKVLPSGVYQFRFIVDGQWRYAPDLPWAQDDAGNAYNILDLQDYVPEDIGSISSFEPPKSPDSSYNNLQLSSEDYAKEPPLVPPYLQMTLLNIPSTNMEVQPLTSRPQHVVLNHLYMQKGKGSPSVVALGTTHRFVAKYVTVVLYKSLQR

SEQ ID NO: 436 - protein, 160 aa, Glycine max
MASSSGTSSGSSLLQNSGSEEDLQAVMDQRKRKRMISNRESARRSRMRKQKHLDDLVSQVAQLRKENQQILTSVNITTQQYLSVEAENSVLRAQVGELSHRLESLNEIVDVLNATTVAGFGAAATSSTFVEPINNNSFFNPLNMGYLNHPIMASADILQY

SEQ ID NO: 437 - protein, 505 aa, Oryza Sativa
MEGAGRDGNPLGGYRIGKTLGIGSFGKVKIAEHILTGHKVAIKILNRRKIKSMEMEEKVKREIKILRLFMHPHIIRLYEVIDTPADIYVVMEYVKSGELFDYIVEKGRLQEEEARRFFQQIISGVEYCHRNMVVHRDLKPENLLLDSKCNVKIADFGLSNVMRDGHFLKTSCGSPNYAAPEVISGKLYAGPEVDVWSCGVILYALLCGTLPFDDENIPNLFKKIKGGIYTLPSHLSPLARDLIPRMLVVDPMKRITIREIREHQWFTVGLPRYLAVPPPDTAQQVKKLDDETLNDVINMGFDKNQLIESLHKRLQNEATVAYYLLLDNRLRTTSGYLGAEFHESMESSLAQVTPAETPNSATDHRQHGHMESPGFGLRHHFAADRKWALGLQSRAHPREIITEVLKALQELNVCWKKIGHYNMKCRWSPSFPSHESMMHNNHGFGAESAIIETDDSEKSTHTVKFEIQLYKTRDEKYLLDLQRVSGPQLLFLDLCSAFLTQLRVL

SEQ ID NO: 438 - protein, 548 aa, Oryza Sativa
MLTRTITYCMVSVTHRIHHPSIMNKLFSTAWILRHVLRWFKVKMDGNAKGGGHSEALKNYNLGRTLGIGSFGKVKIAEHKLTGHRVAIKILNRRQMRNMEMEEKAKREIKILRLFIHPHIIRLYEVIYTPTDIYVVMEYCKFGELFDYIVEKGRLQEDEARRIFQQIISGVEYCHRNMVVHRDLKPENLLLDSKYNVKLADFGLSNVMHDGHFLKTSCGSPNYAAPEVISGKLYAGPEVDVWSCGVILYALLCGTLPFDDENIPNLFKKIKGGIYTLPSHLSALARDLIPRMLVVDPMKRITIREIREHQWFQIRLPRYLAVPPPDTAQQAKMIDEDTLQDVVNLGYGKDHVCESLRNRLQNEATVAYYLLLDNRFRATSGYLGADYQESLERNFNRFASSESASSNTRHYLPGSSDPHASGLRPHYPVERKWALGLQSRAQPREIMIEVLKALQDLNVSWKKNGQYNMKCRWSVGTQATDMLDVNNSFVDDSIIMDNGDVNGRLPAVIKFEIQTRDEKYLLDMQRVTGPQLLFLDFCADFLTKLRVL

SEQ ID NO: 439 - protein, 509 aa, Oryza Sativa
MEGNARGGGHSEALKNYNLGRTLGIGSFGKVKIAEHKLTGHRVAIKILNRRQMRNMEMEEKAKREIKILRLFIHPHIIRLYEVIYTPTDIYVVMEYCKFGELFDYIVEKGRLQEDEARRIFQQIISGVEYCHRNMVVHRDLKPENLLLDSKYNVKLADFGLSNVMHDGHFLKTSCGSPNYAAPEVISGKLYAGPEVDVWSCGVILYALLCGTLPFDDENIPNLFKKIKGGIYTLPSHLSALARDLIPRMLVVDPMKRITIREIREHQWFQIRLPRYLAVPPPDTAQQAKMIDEDTLQDVVNLGYEKDHVCESLRNRLQNEATVAYYLLLDNRFRATSGYLGADYQESLERNLNRFASSESASSNTRHYLPGSSDPHASGLRPHYPVERKWALGLQSRAQPREIMIEVLKALEDLNVCWKKNGQYNMKCRWSVGYPQATDMLDVNHSFVDDSIIMDNGDVNGRLPAVIKFEIQLYKSRDEKYLLDMQRVTGPQLLFLDFCAAFLTKLRVL

SEQ ID NO: 440 - protein, 295 aa, Oryza Sativa
MGNASGREEDPAAAAGEGDVEDSSVRSSERGFPPYGGGGNHVRRACSVGVVGGGGGAGSPPGSPGRSLSPRMFVPQTPVPPLQRAADVTPVFNRILMNEQEEEFDGPPQKEIPVLIVWTLGGKNVSVEGSWDNWKSRKPMQKSGKDHSLLLILPSGVYRYRFVVDGERKCLPDLPCETDIMGNAVNLLDVHDFVPESVESVAEFEPPPSPDSSYSIQAPEEKDFSKEPPVLPSQLHLGVLNSQNSDESCARPQHIVLNHLFIEKGWGAHPLVALGLTHRFESKYVTVVLYKPIER

SEQ ID NO: 441 - protein, 290 aa, Oryza Sativa
MGNASGKEGEENGHVAAGAAAGVAGSAGAAARAPPPLMPPDAVMRELPPPVPYVFTPQVPVAPLHIPTEFSPVFNNSWINESDESTNNHPQEKGIPTLISWSQGGNEVFVEGSWDNWTSRRVLEKSGKDHTILLVLPSGVYHYRIIVDGEPKYVPELPHVADEGGQVANLLDVHDYIPESLGSVAGFDSPPSPEHSYDLQLPGDEEFAKEPPILPPQLVMSVLGDTDNSEEQTLKPKHVVLNHLYIEKGWGSQSLLALGVTHRFQSKYVSFVLYKPLRRSSTAKRTKNGG

SEQ ID NO: 442 - protein, 163 aa, Oryza Sativa
MASSSGSGGSAVSAATAAAGGSSSAAEEELRALMEQRRAKRMLSNRESARRSRMRKQRHLDDLTAQVAHLRRENAHVATALGLTTQGLLAVDAENAVLRTQAAELAARLASLNDILSCINTNGAAAAAAAALTVAAATDPLLAFDSAAFDDLFRSSPELFQLC

SEQ ID NO: 443 - protein, 332 aa, Brassica napus
MSTSKTLDNNKHFETSQTQMGFALINQNTTNATTATTGERRGRRSKQAEPGRFLGVRRRPWGRYAAEIRDPTTKERHWLGTFDTAHEAALAYDRAALSMRGTQARTNFVYTPNDVHTILTNPNLHSLIVSPYNNQSLLQNSSPQFVIDHHPHYQNYQQPKLSLPQTVLPAASFKTPVRHQNADIQAFGSSPQNSSSNGSLSSSLDEENNFFSLEGSNSSNNSGYLDCIVPNHCLKPPPETTTIQNESGAGFTTPASKASESYEGFSNSYFQDVDMMMEFGSCDLSAMITNYGAGTSMSMEDYAIMEPQNFSSSSIAAFGDVVADTTGFYSLY

SEQ ID NO: 444 - protein, 348 aa, Brassica napus
MISGGDVYKAIEAMVPLYVALISGYGSVKWWNIFTRDQCDAINQLVYYFTLPLFTIEFTTHVDPFNMNYRFIAADVLSKIIIIAVLAFWAKYSSKGSYCWSITSFSLCTLTNSLVVGVPLAKAMYGQEAVDLVVQSSVFQAIVWLTLLLFVLELRRAGFSSNNKVDDINIEGGRKETVVVREEKSFLEVMSVVWLKLATNPNCYSCILGIAWAFISNRWHFEMPGIIEGSILIMSKAGTGTAMFNMGIFMALQDKLIVCGTSLTAMGMVLKFIAGPAAMAIGSIAVGLYGDVLRVAIIQAALPQSITSFIFAKEYGLHADVLSTAVIFGMLVSLPVLVAYYAALEFIH

SEQ ID NO: 445 - protein, 619 aa, Brassica napus
MITGKDMYDVLAAMVPLYVAMMLAYGSVRWWGIFTPDQCSGINRFVAVFAVPLLSFHFISSNDPYAMDYQFLAADSLQKVVILSALFLWQARIINLTASGCRRGSLEWMITLFSLSTLPNTLVMGIPLLRAMYGDFSGNLMVQIVVLQSIIWYTLMLFLFEFRGAKLLISEQFPETAGSITSFRVDSDVLSLNGREPLETDAEIGDDGKLHVVVRRSSAASSMISSFNKSHGGGFNSSMITPRASNLTGVEIYSVQSSREPTPRASSFNQTDFYAMFNASKAPSPHVYSLQSSKGVTPRTSNFDEEALKNAKKGGRGAKIPSYPPPNPMFKGSTSGASSGGGGEQNKEMNMFVWSSSASPVSEAHARNAITRGASTDSSTDPKAYLPPHENLASKAMHNLIENMTPGRKAHVEMDQEGNNEGKSGVNSSPYNGKKGSDVEDGGPGGPRKPQMPPASVMTRLILIMVWRKLIRNPNTYSSLFGLAWSLISFKWNIKMPTIMSGSISILSDAGLGMAMFSLGLFMALQPKIIACGKSVAVFAMAVRFLTGPAVIAATSIAIGLRGSLLHVAIVQAALPQGIVPFVFAKEYNVHPDILSTAVIFGMLVALPVTVLYYVLLGI

SEQ ID NO: 446 - protein, 485 aa, Brassica napus
MISWHDLYTVLTAVIPLYVAMILAYGSVRWWKIFSPDQCSGINRFVAIFAVPLLSFHFISTNNPYAMNLLVVLQCIIWYTLLLFLFEFRGAKMLIMEQFPETAASIVSFKVESDVVSLDGHDFLETDAEIGNDGKLHVTVRKSNASRRSFCGPNMTPRPSNLTGAEIYSLSTTPRGSNFNQSDFYSMMGFPGGRGGGGSKELHMFVWSSNGSPVSDRAGLNAPDSGSNNEQGGRSDQGAKEIRMLVPDQSQNSENKALARPASGDFGGEPVSITRREEGERAKDAENGLNKPITNALLQSKTGLGAAAEGEASQGKHMPPASVMTRLILIMVWRKLIRNPNTYSSLIGLIWALVAFRWHVAMPKIIQQSISILSDAGLGMAMFSLGLFMALQPKLIACGNSVATFAMAVRFLTGPAVMAVASIAIGLRGDLLRVAIVQAALPQGIVPFVFAKEYNVHPAILSTGVIFGMLIALPITLVYYILLGL

SEQ ID NO: 447 - protein, 362 aa, Brassica napus
MVSWLDVYNVFSATVPLYVSMILGYLSTKHLNLFSLEQCVGINKFIAKFSIPLLSFQVISQNNPFTMSLRLILSDILQKILAAVVLAVVIRFWHPKGGTGGKLGWIITGLSVTVFPNTLIIGIPILSAIDGDAAKNILVQIVVLQCLIWSNILLFLFEINATWDLQSSGASIEHRVNDNEETDIEQEPIEEEAIVRTRSSGTGKIILKAWRKFIVNPNTYAAMIGLIWATLHFRLGWKLPEMIDKSIHLISDGGLGMAMFSLGLFMASQSSIIACGTKMSIITMILKFILGPALMIASAFCIRLRGTLFRVTILQATLPQGIVPFVFAKEYNVNPEIVSTGVIFGMLVFVPITLAYYFVLDL

SEQ ID NO: 448 - protein, 534 aa, Brassica napus
MELMNMASKETSYWMIALPAVFGTQNMYDVSIFGYLILAVVSLSLLTWAFAGGGGVAWKNGRNRIGRVAIPGPRGIPVFGSLFTLSRGLAHRSLAAMAWSRANTQIMAFSLGTTPVIVASEPNTAREILMSPHFADRPVKQSAKSLMFSRAIGFAPNGAYWRTLRRIASTHLFAPKRILAHEAGRQLDCAEMVKAVSDEQNGAGSVVLRKHLQLAALNNIMGSVFGRRYDPLAQEEALDELTSMVREGFELLGAFNWSDHLSWLSYFYDPVRLKQRCSELVPRIKTLVKKIIEEHRASNSENKGDVGDFVDVLLSLDGDEKLQEDDMIAVLWEMIFRGTDTTALLTEWTMAELVLNPNVQAKLRDEIKTVVGDRAEVPDADLAKLPYLNAVLKETLRLHPPGPLLSWARLSTSDVQLSNGMVIPKGTTAMVNMWAITHDPTVWSDPLQFNPDRFIGNADVDIRGGDLRLAPFGAGRRVCPGKNMGLATVTRWVAELVRRFEWSQDQTEPVNLSEVLKLSCEMEHPLRAVVTEIY

SEQ ID NO: 449 - protein, 318 aa, Oryza Sativa
MNTRGSGSSSSSSSSQASLMAFSEPPKPASQPSPPSSPMSERPPSGRSRRRAQEPGRFLGVRRRPWGRYAAEIRDPTTKERHWLGTFDTAQEAALAYDRAALSMKGAQARTNFVYTHAAYNYPPFLAPFHAPQYAAAAAAPSSVQYGGGVGAAPHIGSYGHHHHHHHHHGHGAASGASSVGECSTMPVMVPVDPHRSSMSSSLLDMDRNGHDFLFSGADDNSGYLSSVVPESCLRPRGGGAAADHQDMRRYSDADAYGMMGLREDVDDLAQMVAGFWGGGDAADQLGACGFPASGGAADMVASSQGSDSYSPFSFLSH

SEQ ID NO: 450 - protein, 357 aa, Oryza Sativa
MAPLYFALGLGYGSVRWWRFFTAEQCAAINTMVVYFSMPFFTFDFVVRTDPFAMNYRVIAADAVSKAIAIAAMAAWARTRCGCAAAKAGAQSWSITGFSLAALNNTLVVGVPLLDAMYGRWAQDLVVQIAVVQSMVWFPLLLMAFELRKAWVVGGGGGVGPAVMSSSSPPEKQSDVEMNGAVVAAPGGGGGVRLPFWATARTVGLKLARNPNVYASVLGVVWACIAYRWHLSLPGIVTGSLQVMSRTGTGMSMFSMGLFMGQQERVIACGAGLTALGMALRFVAGPLATLVGAAALGLRGDVLHLAIIQAALPQSIASFVFAKEYGLHADVLSTAVIFGTLISLPILIAYYAVLGFV

SEQ ID NO: 451 - protein, 565 aa, Oryza Sativa
MKQEQVRMAVLLMLNCFVKATAPPPWPPSASSASFLDDLGDLGIAPLIRADEAGTARASADFGNLSVAGVGAPRLAAAAAVLYPSRPADIAALLRASCARPAPFAVSARGCGHSVHGQASAPDGVVVDMASLGRLQGGGARRLAVSVEGRYVDAGGEQLWVDVLRASMAHGLTPVSWTDYLHLTVGGTLSNAGISGQAFRHGPQISNVLELDVITGVGEMVTCSKEKAPDLFDAVLGGLGQFGVITRARIPLAPAPARARWVRFVYTTAAAMTADQERLIAVDRAGGAGAVGGLMDYVEGSVHLNQGLVETWRTQPQPPSPSSSSSSSFFSDADEARVAALAKEAGGVLYFLEGAIYFGGAAGPSAADVDKRMDVLRRELRHERGFVFAQDVAYAGFLDRVHDGELKLRAAGLWDVPHPWLNLFLPRSGVLAFADGVFHGILSRTPAMGPVLIYPMNRNKWDSNMSAVITDDDGDEVFYTVGILRSAAAAGDVGRLEEQNDEILGFCEVAGIAYKQYLPYYGSQAEWQKRHFGANLWPRFVQRKSKYDPKAILSRGQGIFTSPLA

SEQ ID NO: 452 - protein, 426 aa, Oryza Sativa
MGEEAVVMEAPRPKSPPRYPDLCGRRRMQLEVQILSREITFLKDELHFLEGAQPVSRSGCIKEINEFVGTKHDPLIPTKRRRHRSCRLFRWIGSKLCICISCLCYCCKCSPKCKRPRCLNCSCSSCCDEPCCKPNCSACCAGSCCSPDCCSCCKPNCSCCKTPSCCKPNCSCSCPSCSSCCDTSCCKPSCTCFNIFSCFKSLYSCFKIPSCFKSQCNCSSPNCCTCTLPSCSCKGCACPSCGCNGCGCPSCGCNGCGCPSCGCNGCGLPSCGCNGCGSCSCAQCKPDCGSCSTNCCSCKPSCNGCCGEQCCRCADCFSCSCPRCSSCFNIFKCSCAGCCSSLCKCPCTTQCFSCQSSCCKRQPSCCKCQSSCCEGQPSCCEGHCCSLPKPSCPECSCGCVWSCKNCTEGCRCPRCRNPCCLSGCLC

SEQ ID NO: 453 - protein, 527 aa, Oryza Sativa
MEVAMVCTRVNLLILILSLCSPYKFIQSPMDFGPLNLLPTTTTASSDFGRILFHSPSAVLKPQAPRDISLLLSFLSASPLGKVTVAARGAGHSIHGQAQALDGIVVEMSSLPSEIEFYRRGEGDVSYADVGGGIMWIELLEQSLKLGLAPRSWTDYLYLTIGGTLSNAGISGQTFKHGPQISNVLQLEVVTGRGEIVTCSPTKDAELFNAVLGGLGQFGIITRARILLQEAPQKVKWVRAFYDDFATFTKDQELLVSMPVLVDYVEGFIVLNEQSLHSSSIAFPTNVDFNPDFGTKNNPKIYYCIEFAVHDYQNKNINVEQVVEVISRQMSHIASHLYSVEVSYFDFLNRVRMEEMSLRNSGLWEVHHPWLNMFVPSAGISDFRDLLMDSISPDNFEGLILIYPLLRHKWDTNTSVVLPDSGSTDQVMYAVGILRSANPDDGCSHHCLQELLLRHRRLAGAAASGLGAKQYLAHHPTPAGWRRHFGRRWERFADRKARFDPRCILGPGQGIFPRDSSSSNGAFASYS

SEQ ID NO: 454 - protein, 534 aa, Oryza Sativa
MAWCLVFMVFLIYCLISTVGLPVAPADEAAMQLGGVGGGRLSVEPSDVMEASLDFGRLTSAEPLAVFHPRGAGDVAALVKAAYGSASGIRVSARGHGHSISGQAQAAGGVVVDMSHGWRAEAAERTLPVYSPALGGHYIDVWGGELWIDVLNWTLAHGGLAPRSWTDYLYLSVGGTLSNAGISGQAFHHGPQISNVYELDVVTGKGEVVTCSESNNPDLFFGALGGLGQLGIITRARIALEPAPHRVRWIRALYSNFTEFTADQERLISLQHGGRRFDYVEGFVVAAEGLINNWRSSFFSPQNPVKLSSLKHHSGVLYCLEVTKNYDDSTAVTVDQDVEALLGELNFIPGTVFTTDLPYVDFLDRVHKAELKLRGKGMWEVPHPWLNLFVPASRIADFDRGVFRGVLGSRTAGGPILIYPMNRHKWDPRSSVVTPEEDVFYLVAFLRSAVPGSTDPAQSLEALERQNREILEFCDEAGIGAKQYLPNHKAQREWEAHFGARWARFARLKAEFDPRAMLATGQGIFDSPPLLAES

SEQ ID NO: 455 - protein, 670 aa, Oryza Sativa
MISGHDFYTVMAAVVPLYVAMFLAYGSVRWWGIFTPDQCSGINRFVAIFAVPLLSFHFISTNDPYAMNLRFLAADTLQKLLVLAGLAAWSRLPSRTGAPRLDWSITLFSLSTLPNTLVMGIPLLIAMYGPYSGSLMVQIVVLQCIIWYTLMLFLFEFRAARMLIADQFPDTAASIVSLHVDPDVVSLEGGHAETEAEVAADGRLHVTVRRSSVSRRSLLVTPRPSNLTGAEIYSLSSSRNPTPRGSNFNHADFFAMVGGGPPPPTPAAVRGSSFGASELYSLQSSRGPTPRQSNFDEHSARPPKPPATTTGALNHDAKELHMFVWSSSASPVSEVSGLPVFSGGGGGGALDVGAKEIHMVIPADLPQNNGSGKEHEEYGAVALGGGGGGENFSFGGGKTVDGAEAVDEEAALPDGLTKMGSSSTAELHPKVVDVDGPNAGGGAAGAGQYQMPPASVMTRLILIMVWRKLIRNPNTYSSLLGLAWSLVAFRIVHGAAAQHHRVWQISRRRLHGRPLPRGPCRHGRRVNRHRTPRDAPARRHCSGGSTTRDCAFCFCKRIQCPPGHPEHSGNFWHANSSSNHIAVLHPSWTMIKKAYGRSHIKRKKWGQRERKKSDPVHLKQRMLICIACCRTLPMMTRQRSCYRAIYLCDICTRDNDRMYSNITDIRYVFC

SEQ ID NO: 456 - protein, 591 aa, Oryza Sativa
MISWHELYMVLSAVVPLYVAMMVAYGSVRWWGVLTPEQCSGINRFVAVIAVPLLSFHFISSSDPYAMNLRFVAADTLQKVLVLAALAAWSRFPARFVPPAWPPLDCSITLFSVSTLPNTLVMGIPLLVSMYGPYSGDLMVQIVVLQSIVWYTLLLFLFEFRAARVLIAAQFPDTAASIAAVHVDPDVVSLEGSQAEAHAEVAPDGRLRMVVCRSSVSRRSAAAAATPRASNLTGVEIYSISSSRNATPRGSTFTLADIPGHQPPNSALRASSFGAADLFSLHSSSRQHTPRPSSFDEHAAARARASATVAPTNDLKDTHMIEWSSGASAASEVTGLPVFRSGRETRRLVPSDAPSIASSRVIRPPPGATGGERAASFNKAVGGQDELAKLEAGAKTEQQTTAVTTTTKGGGAAGAERARGQQNAPAGVMLRLILTTVWRRLIRNPNTYASLIGLTWSLIAFRFHITMPIIVAKSISILSDAGLGMAMFSLGLFMATQPKIIACGYSVAAASMGVRFFFGPAIMAAASAAVGIRGTLLRIAIVQAALPQGIVPFVFAKEYNLHATILCTLVIFGMLIALPITLVYYIILGLL

SEQ ID NO: 457 - protein, 592 aa, Oryza Sativa
MITGADFYHVMTAMVPLYVAMILAYGSVKWWRIFTPDQCSGINRFVALFAVPLLSFHFISTNNPYTMNLRFIAADTLQKLIVLALLTLWSHLSRRGSLEWTITLFSLSTLPNTLVMGIPLLKGMYGEFSGSLMVQIVVLQCIIWYTLMLFMFEYRGARILITEQFPDTAGAIASIVVDADVVSLDGRRDMIETEAEVKEDGKIHVTVRRSNASRSDVYSRRSMGFSSTTPRPSNLTNAEIYSLQSSRNPTPRGSSFNHTDFYSMVGRSSNFAAGDAFGVRTGATPRPSNYEEDAAAPNKAGSKYGQYPAPNPAMAAPPKPKKAANGQAKGEDGKDLHMFVWSSSASPVSDVFGNGAEYNDAAAVKEVRMAVASPRKADGVERDDFSFGNRGVAERDAEAGDEKSVAAAVSGEHGKPGLTPAPTAMPPTSVMTRLILIMVWRKLIRNPNTYSSLIGLIWSLVCFRWNFEMPAIILKSISILSDAGLGMAMFSLGLFMALQPRIIACGNKVATFAMAVRFLTGPAVMAAASIAVGLRGTLLHVAIVQAALPQGIVPFVFAKEYSVHPDILSTAVIFGMLIALPITLVYYILLGL

SEQ ID NO: 458 - protein, 595 aa, Oryza Sativa
MITAADFYHVMTAMVPLYVAMILAYGSVKWWRIFTPDQCSGINRFVALFAVPLLSFHFISTNNPYTMNLRFIAADTLQKLMVLAMLTAWSHLSRRGSLEWTITLFSLSTLPNTLVMGIPLLKGMYGEFSGSLMVQIVVLQCIIWYTLMLFMFEYRGARMLITEQFPDTAANIASIVVDPDVVSLDGRRDAIETETEVKEDGRIHVTVRRSNASRSDIYSRRSMGFSSTTPRPSNLTNAEIYSLQSSRNPTPRGSSFNHTDFYSMVGRSSNFGAADAFGVRTGATPRPSNYEDDASKPKYPLPASNAAPMAGHYPAPNPAVSSAPKGAKKAATNGQAKGEDLHMFVWSSSASPVSDVFGGGAPDYNDAAAVKSPRKMDGAKDREDYVERDDFSFGNRGVMDRDAEAGDEKAAAAAGADPSKAMAAPTAMPPTSVMTRLILIMVWRKLIRNPNTYSSLIGLIWSLVCFRWNFEMPAIVLKSISILSDAGLGMAMFSLGLFMALQPHIIACGNKVATYAMAVRFLAGPAVMAAASFAVGLRGTLLHVAIVQAALPQGIVPFVFAKEYSVHPSILSTAVIFGMLIALPITLVYYILLGL

SEQ ID NO: 459 - protein, 554 aa, Oryza Sativa
MITVVDLYHVLTAVVPLYVAMTLAYASVRWWRIFSPDQCSGINRFVALFAVPLLSFHFISTNNPFAMNLRFLAADTLQKLIVLALLALWCRLSARGSLDWLITLFSLSTLPNTLVMGIPLLKGMYAAAADVDSGSLMVQIVVLQCIIWYTLMLFLFEYRGARLLVMEQFPDTAASIVSFRVDSDVVSLAGGGGGAAELQAEAEVGDDGRMRVTVRKSTSSRSEAACSHGTQSHSQSMQPRVSNLSGVEIYSLQSSRNPTPRGSSFNHAEFFNIVGNGKQGDEEKGAAGGGGHSPQPVVGKRKDLHMFVWSSSASPVSERAAAAAAGAVHVFGGGGADHGDAKGAQAYDEYSFGNKNEKDGPTLSKLGSNSTAQLRPKDDGEGMAAAMPPASVMTRLILIMVWRKLIRNPNTYSSLLGVIWSLVSYRWGIEMPAIIARSISILSDAGLGMAMFSLGLFMALQPRIIACGNSLASYAMAVRFLVGPAVMAAASIAVGLRGVLLHIAIVQAALPQGIVPFVFAKEYNVHPNILSTAVIFGMLIALPITLVYYILLGL

SEQ ID NO: 460 - protein, 390 aa, Oryza Sativa
MEQFPDTAASIVSFRVDSDVVSLAGGGGGAAELQAEAEVGDDGKMRVTVRKSTSSRSEAACSHGTQSHSQSMQPRVSNLSGVEIYSLQSSRNPTPRGSSFNHAEFFNIVGNGKHGDEEKGAAGGGGHSPQPVVGKRKDLHMFVWSSSASPVSERAAAAAAAGAVHVFGGGGADHGDAKGAQAYDEYSFGNKNEKDGPTLSKLGSNSTAQLRPKDDGEGRAAAMPPASVMTRLILIMVWRKLIRNPNTYSSLLGVIWSLVSYRWGIEMPAIIARSISILSDAGLGMAMFSLGLFMALQPRIIACGNSLASYAMAVRFLVGPAVMAAASIAVGLRGVLLHIAIVQAALPQGIVPFVFAKEYNVHPNILSTAVIFGMLIALPITLVYYILLGL

SEQ ID NO: 461 - protein, 630 aa, Oryza Sativa
MITGRDIYDVLAAIVPLYVAMFLAYGSVRWWGIFTPDQCSGINRFVAVFAVPLLSFHFISTNDPYSMNYRFLAADSLQKLVILAALAVWHNLLSRYRRNGGAAASLDWTITLFSLSTLPNTLVMGIPLLRAMYGDFSGSLMVQIVVLQSVIWYTLMLFLFEYRGAKALISEQFPPDVGASIASFRVDSDVVSLNGREALQADAEVGRDGRVHVVIRRSASASTTGGGGGAARSGVSRAYGASNAMTPRASNLTGVEIYSLQTSREPTPRASSFNQADFYAMFSGSKMASQMASPMAQHGGAGGRAQGLDEQVTNKFASGKAADPPSYPAPNPGMMPAPRKKELGGSNSNSNKELHMFVWSSSASPVSEANLRNAVNHAASTDFASAPPPAAVPVGGATPKGVSGSVTPAAKNGGGELEIEDGLKSPAAGLAAKFPVSGSPYVAPRKKGGGADVPGLAEAAHPMPPTSVMTRLILIMVWRKLIRNPNTYSSLIGLVWSLVSFRWNIQMPSIIKGSISILSDAGLGMAMFSLGLFMALQPKIISCGKTVATFAMAVRFLTGPAVIAATSIAIGLRGVLLHVAIVQAALPQGIVPFVFAKEYNCHPQILSTAVIFGMLIALPITILYYVLLGI

SEQ ID NO: 462 - protein, 363 aa, Oryza Sativa
MIGWGDVYKVVAATVPLYFALFLGYGSVRWWRIFTREQCDAVNRLVAFFALPFFTFEFTLHTDPFQVNYRAVAADVISKAVIVAVIGAWARFMSKGGCAVSWSITSFSLSTLTNSLVVGVPMARAMYGEWAQQLVVQLSVFQAIVWLTLLLFVLEVRKAAIGMYVDGAEAAAAAGKDVEAAGAAAAAGTVVVAAAAGKPSLWALVKVVAHKLARNPNTYASFVGITWACLANRLHIALPSAFEGSVLIMSKSGTGMAMFSMGLFMAQQEKIIACGTSFAALGLVLKFALGPAAMAIGSIAVGLRGDVLRVAIIQAALPQSITSFIFAKEYGLHADVLSTAVIFGMLVSLPLLVGFYIVLELIR

SEQ ID NO: 463 - protein, 398 aa, Oryza Sativa
MAPLYFALGLGYGSVRWWRLFTADQCDAVNRLVACFAVPFFAFDFAARIDPFALSYRVLAADALSKLAVALALAACAAAASTRCCGSGGGKRGGGGGFSWCITGFSLATLNNTLVVGVPLLDAMYGKWARDLIVQISVVQTIVYFPLLLLAFEVRRATTAAAAPPPPPTGTDDDDVEDGAAAAATAAAARRSLWPLVRAVWLKVARNPNVYAGVLGVAWACVTNRWHVETPSIIEGSVLIMSKTGVGLSMFSMGLFMALQDKIIVCGAGLTVLGMALRFVAGPAATAVGAFALGLRGDLLRLAIIQAYTHLHEIHSPSSFFLLSPEICLNSNGCMHDTSPHDETARDEQAALPQSITTFVFAKEYGLHAEILSTAVIFGTLASLPVLIVYYIVLGFIR

SEQ ID NO: 464 - protein, 311 aa, Oryza Sativa
MVSWKDIYLVLEATVPLYVAMILAYLSIKWWKLFTPEQCSGINKFVAKFSIPLLSFQVISTTDPYDMNIKLIYSDILQKSLALLGFAAISKACCAEKFDWLITGFSLSTLPNTLIVGIPLLKGMYGEQAGKLLSQIVVLQSLIWYTLLLFLFELRAANGMATTTSSETTGLIWALVGFRWHIRLPLIVSNSIRMLSDGGLGMAMFSLGLFTALQTKIIACGAKRMLLALAIRFFLGPALMGMSSYAIGMRGVLLKIAIVQAALPQGIVPFVFAKEYNVQADILSTAIIVGMMVAVPVALAYYFAMIIPAIK

SEQ ID NO: 465 - protein, 426 aa, Oryza Sativa
MITGSEVYQVVEAMAPLYTAAALGYGSVRWLKAFSNEQCAGINHFVALYAVPVLIFDMVSTNNVYKMNGRLIAADTLQKAVLLLGLMAWALWERSRARGAGAKAKAAVSSPLQWVITCFSVASLPNTIIMGVPLLNGMYGPVSKDLMKQIVVMQFCIWYNVIIFLYEYMAARRSASAPPPASSEGSAKISPSSPVKAAAAAADTNGNAVAADRPQEVAVNIEITEMAASTARDGVSGETTAAAKEVSSGEVAPVEEEEASAPAPSMKHVIWMAVKKLLQIPNTYASFLGLIWSLIAFKCGFSMPKIVEDSLFTIRTTAVGLSMFSSGTFIARQSRFVPCGYKIASFSMVIKFLIGPVVMLFASLVIGMHGTLLHIAVVQAALPLAVTSFVYAEEYKVHADIMSTGVILGIFISLPVTIVYYILLGL

SEQ ID NO: 466 - protein, 555 aa, Oryza Sativa
MAMATATASSCVDATWWAYALPALLGADTLCAHPALLAGAVLLAFATAAVLAWAASPGGPAWAHGRGRLGATPIEGPRGLPVFGSIFALSRGLPHRALDAMSRDAAAPRARELMAFSVGETPAVVSSCPATAREVLAHPSFADRPLKRSARELLFARAIGFAPSGEYWRLLRRIASTHLFSPRRVAAHEPGRQADATAMLSAMAAEQSATGAVVLRPHLQAAALNNIMGSVFGRRYDVSSSSGAAADEAEQLKSMVREGFELLGAFNWSDHLPWLAHLYDPNHVARRCAALVPRVQAFVRGVIRDHRLRRDSSSTAADNADFVDVLLSLEAHENLAEDDMVAVLWEMIFRGTDTTALVTEWCMAEVVRNPAVQARLRAEVDAAVGGDGCPSDGDVARMPYLQAVVKETLRAHPPGPLLSWARLATADVGLANGMVVPAGTTAMVNMWAITHDGEVWADPEAFAPERFIPSEGGADVDVRGGDLRLAPFGAGRRVCPGKNLGLATVTLWVARLVHAFDWFLPDGSPPVSLDEVLKLSLEMKTPLAAAATPRRRRAA

SEQ ID NO: 467 - protein, 359 aa, Oryza Sativa
MIQELLGGTTMDQLKGASALNHASLPVVLQPIVSNPSPTSSSSTSSRSSAQATQQRSSSATSSPHGQGQGGGAAEQAPLRCPRCNSSNTKFCYYNNYNLTQPRHFCKTCRRYWTKGGALRNVPIGGGCRKPRPMPAPVAKPPMSCKAAPPLGLGGGPVSWASGQQAATAHLMALLNSARGVQGHGGSNVHRLLGLDTMGHLQILPGAPNGAGAGTAASLWPQSAPRPVTPPPPHMDSQLGMGTLGHHDVLSSLGLKLPSSASSSPAASYYSDQLHAVVSNAGRPQAPYDVATASLPCTTAVTSLPSALSSVSAAAPTSNTVGMDLPPVSLAAPEMQYWNGPAAMSVPWPDLPTPNGAFP

SEQ ID NO: 468 - protein, 336 aa, Brassica napus
MDAGGGLVSSAKSILEKPLKLLTEDDISQLTREDCRKFLKDKGMRRPSWNKSQAIQQVLSLKALFEPGDDSGAGILRKILVSPNPTRVTATSAEPASEVGARIPFQEDDRRDSPRSAEFSGSEKDSYNTISPSRSPAETSALVGQMTIFYSGKVSVYDGVPPEKARSIMHFAANPIDLPEYGVSASARMTSRPMSSKEKMVEPPHYGLEKANASRDSDAEGQANRKVSLQRYLDKRKDSRRLFKNKKAPGVASSSLEMYLNRSQPVTNAYSQSLSGGGTGGEQHESPENQRRSPNLSVDLNSDLNSEGVEQEQLKRRQGMFSSSETWHKKVELEES

SEQ ID NO: 469 - protein, 815 aa, Brassica napus
MAEQLLLHGTLEVKIYRIDRLHKRGKFSLCGTGTGNKEPAGKKIQSPIKNLTSSCADLLGGHLYATVDLDRARVARTTMRRHPKWFQSFHLYAAHSISKIIFTVKEDEPISANLIGRAYLPVTEVITGQPVDRWLDLLDEHKSPIQGGSKIHVRVTFTSVTHDVNWNKGIVIPSFKGVPNAFFNQREGCKVTLYQDAHVLEDYQDITLSGGQVIYSHHRCWEDIFDAIWDAKHLIYITGWSVYTDITLIRDPKRPRQGGNLKLGELLKKKAEENVTVLMLVWDDRTSNEAFKRDGLMMTHDQETYNYFKNTKVRCVLCPRNPDNGSSIVQGFEVAAMFTHHQKTVVVDAERRIVSFLGGIDLCDGRYDTQEHPLFGTLNNFHSNDFHQPNFDGASIKKGGPREPWHDIHCKLDGPAAWDVLYNFEQRWMKQGSGRRYLVSMERLSEITVPPLPFVKSDDVEGWTVQIFRSIDDGAVLGFPEDPREASSVGLITGKNNVIERSIQDAYINAIRRAKHFIYIENQYFLGSSFGWSSRDVNINEINALHLIPKEISLKIVSKIEAGERFSVYVVIPLWPEGKPGSASVQAILDWQRRTMEMMYTDVVIALRKKGLDANPRDYLTFFCLGNREVNKAGEYSPPEKPAANSDYARAQESRRFMIYVHSKMMIVDDEYIIIGSANINQRSMDGGRDSEIAMGAYQPNHLLSTNQMKPTGQVFSFRISLWLEHLRVITNPFMFPESEECIRMVNAKADELWGLYSAQVYPRDHDLPGHLLSYPISIGTNGEVTDLAGAELFPDTNAKVFGEKSNYLPPILTT

SEQ ID NO: 470 - protein, 974 aa, Brassica napus
MENYGSRYPYPYPQYPYQPSYQYPPAPYRPPGPGSEQYQPPPPPYYPYPPPYATPPPYASPPPLHQHASGSHSGPLDYPPQPSSSPEYHRHSFDYRPSPYPSPYPPHPQGTYAPPPPHYPYQEPAAQYAPPETKPQDPTPPPPSKTQAFPEYRRQDCLTSVPNDNVLLLHGNFDIWIYHAKNLPNMDMFHKTLGDVFGGQLNRKITSDPYVSVSVAGAVIGRTYVMSNSENPVWMQHFYVPVAHHAAEVHFVVKDSDVVGSQLIGLVTIPVEQIYSGAKIEGTFPILSSNGKPCKPGANLSLSIQYTPMEKLSVYHHGVGAGPDYQGVPGTYFPLRKGGTVTLYQDAHVPEGMLPGIRLDNGMSYQHGKCWHDMFDAIRQARRLIYITGWSVWHKVRLVRDKVGPASACTLGELLRSKSQEGVRVLLLVWDDPTSRSILGYKTDGVMATHDEETRRFFKHSSVQVLLCPRNAGKRHSWVKQREVGTIYTHHQKNVIVDADAGANRRKIVAFVGGLDLCDGRYDTPQHPLFRTLQTIHKDDFHNPTFTGNLSGCPREPWHDLHSKIDGPAAYDVLTNFEERWLKAAKPSGIKKFKTSYDDALLRIDRIPDIVGVSDTPTISENDPEAWHVQIFRSIDSNSVKGFPKDPKDATCKNLVCGKNVLIDMSIHTAYVKAIRAAQHFIYIENQYFIGSSYNWNAHKDIGANNLIPMEIALKIAEKIRANERFAAYIVIPMWPEGVPTGAATQRILYWQHKTMQMMYETIYKALVETGLEGAFSPQDYLNFFCLGNREMVDGIDNSGTGSPSNANTPQALSRKSRRFMIYVHSKGMVVDDEYVVIGSANINQRSMEGTRDTEIAMGAYQPQHTWARKHSGPRGQIYGYRMSLWAEHMATLDDCFTQPESIECVRKVRTMGERNWEQFAAEEVSDMRGHLLKYPVEVDRKGKVRPLPGSEAFPDVGGNIVGSFIAIQENLTI

SEQ ID NO: 471 - protein, 1465 aa, Brassica napus
MEGSSNGSLRLVLLHGNLDVWVKEAKNLPNMDRFRRYKKNSTSDPFVTVSIAGAKIGTTFVVDNDENPVWKQHFYVPVAHHAKVVKFVVKDSDRFGAKFIGDVGIPTEELCSGNTIEGLFPILDSSRKPCKKGAVLSLAIQYTPVEMMKFYQMGVGNECEGVPGTYFPLRKGGRVTLYQDAHVEDGTLPSVDLDGGMKYIHGKCWEDMSDAIRQAKNLIYITGWSVYHSVRLVRRNNDPTNGTLGDLLKERSQEGVRVLLLVWDDPTSRSFLGYRTRGYMKTSDEETRHFFKNSSVQVIICPRSGGRGLHSFVKKTEVQTIYTHHQKTVIVDAEAAQGRRKIVAFVGGIDVCKGRFDTPKHPLFTTLKTLHKDDFYNNCFGTTEDDGPRQPWHDLHSMIDGPAAYDVLANFEQRWLKASEKRHRISIHRSSSEDALLKIDKIPNIMGLSEASFVDDNDPESWHVQVFRSIDSTSVKGFPEDSKEASARNLQCGKNILIDMSIHTAYVKAIRSAQHFIYIENQYFFGSSFNWDSHKTVGANNLIPMEIALKIANKIRARENFAAYIVIPMLPEGDPTGIVTQSILQYQYKTMQMMYLTIYKALVEAELDGQYEPQDYLNFFCLGSREVADGNVNNNTKEEDGPQVEALKSRRFMIYVHSKGMIVDDEFVLIGSANINERSLEGSRDTEIAMGGYQPHHSWAKKGSHPRGQIFGYRMSLWAEHLGSLEKGFENPENMECVRRVRRLSELNWRQYAAEEVTEMTSHLLKYPVQVDRAGKVSSLPGCETFPDVFVDPARHLCHPDQRDAILDFKNKFQIQKPCLDRRLKSWENNSDCCSWDGIRCDASFGDVIKLNLSDSCLHGQFNSNSTIFLLQRLPFLTTLDLSSNELSGNIPSSLGNLSKLTTLDLSGNDFSGEIPSSLGNLSKLTTLNNLSQNKFTGKVPSSLGNLLNLTELILCANNFVGEFPSSFGNLSHLTVLDLSQNNFVGEISSFFGSSDHLTDMDVGNNILHGNFPLKLLNLTKLISISISGNQFSGMLPPNMGSLSNLEFFYVEHNTFTGPIPSSSLFTIPSLTYIDFLGDNNFMGSIPRSISKLVNLDTLDLSHLNTQGCGIFEFPELLRTQRNMKTLDISNNKITGQVPGWLWELPIIEYVSTSNNTLIGFESPTKHGISYVRKTSLSYLSGANNNFTGKIPSFICELRSLTTLDLSNNKFSGSFPSCLGNFSRSLEVLNLDVGHNRLVGKLPRSFIRIHFLQVLNVEINKISDTFPFWLRSLPELQVLVLRSNAFHGEIPRSIGLLKELHVLNFSNNAFTGHIPSSLGNLAELESLDVSQNNLSGEIPQELGSLSFLAYMNFSHNQLIGLVPGGTQFLTQPCSSFEDNPGLYGPSLDQVCGCIHATTCQQSETPDPDEDEDEEEVLSWIAAAIGFVPGVFFGLTMGYILVSYKPEWFMKAFVPNKRRHHNSLKR

SEQ ID NO: 472 - protein, 847 aa, Brassica napus
MGGGSSHGFGQQPVPFATSSGSLRVELLHGNLDIWVKEAKHLPNMDGFHNRLGGMLSGLTRRNTSKDEKPSKITSDPYVTVSISGAVIGRTFVISNSENPVWMQHFDVPVAHSAAEVHFVVKDSDIIGSQIMGAVGIPTEQLSSGNRIEGFFPILNSSGKPCKQGAVLSLSVQYTPIERMRLYQMGVGFGNECVGVPGTYFPLRKGGRVTLYQDAHVDDGTLPSVYLDGGVQYRHGKCWEDMADAIRQARRLVYITGWSVYHPVRLVRRNNDPTDGTLGDLLKAKSQEGVRVLVLVWDDPTSRSLLGFKTQGVMNTSDEETRRFFKHSSVQVLLCPRSGGKGHSFVKKSEVGTIYTHHQKTVIVDADAGQNRRKIVAFVGGLDVCNGRFDTPKHPLFRTLKTLHKDDFHNPNFLTTADDGPREPWHDLHSKIDGPAAYDVLANFEERWRKASKSRGLGKLRSASDDSLLSIERIQDIVGLSEASSVNENDPETWHAQVFRSIDSSSVKGFPKDPKEATGRNLLCGKNILIDMSIHAAYVKAIRSAQHFIYIENQYFLGSSFNWDSNKDLGANNLIPIEIALKIANKIRAREKFAAYIVIPMWPEGAPTSNPIQRILYWQHKTMQMMYQTIHKALVEVGLDGQYEPQDFLNFFCLGTREVADGTVSVYNSPRTPPKSNANANAIQVQALKSRRFMIYVHSKGMVVDDEFVLIGSANINQRSLEGTRDTEIAMGGYQPHHSWAKKGSRPRGQIFGYRMSLWAEHLGFLEQGFEEPENMECVRRVRQLSELNWRQYAAEEVTEMQGHLLKYPVQVDRTGKVSSLPGCETFPDLGGKIIGSFLALQENLTI

SEQ ID NO: 473 - protein, 2716 aa, Brassica napus
MDTRCPFSPAEVSKVRVVQFGILSPDEIRQMSVMHVEHSETTEKGKPKVGGLSDARLGTIDRKVKCETCMANMAECPGHFGHLELAKPMYHVGFMKTVLSIMRCVCFNCSKILAHEEEHKFKQAMKIKNPKNRLKKILDACKNKTKCADDDNLEDVQDQDADGPVKKIRGGCGAVQPKLSIEGMKMVAEYKNTRKKNDEKDQLPEPAAMKQTLGADRILSVLKRISDEDCQLLGFNPKYARPDWMILEVLPIPPPPDDLTHQLAMIIRHNENLKRQEKNGAPAHIISEFTQLLQFHIATYFDNEMPGQPRATQKSGRPIKSICSRLKAKEGRIRGNLMGKRVDFSARTVITPDPTINIDELGVPWSIALNLTYPETVTPYNIERLKELVDNGPHPPPGKTGAKYIIRDDGQRLDLRYLKKSSDHHLELGYKVERHLIDGDFVLFNRQPSLHKMSIMGHRIRIMPYSTFRLNLSVTSPYNADFDGDEMNMHVPQSFETRAEVLELMMVPKCIVSPQANRPVMGIVQDTLLGCRKITKRDTFIEKDVFMNTLMWWEDFDGKVPAPAILKPCPIWTGKQVFNLIIPKQINLFRYSAWHSDQETGYITPGDTQVRIERGELLAGTLCKKTLGTGNGSLVHVIWEEVGPDAARKFLGHTQWLVNYWLLQNGFTIGIGDTIADSSTMEKINETISTAKTAVKDLIRQFQEKKLDPEPGRTMTETFENRVNQVLNKARDDAGSSAQKSLAETNNLKAMVTAGSKGSFINISQMTACVGQQNVEGKRIPFGFEGRTLPHFTKDDYGPESRGFVENSYLRGLTPQEFFFHAMGGREGLIDTAVKTSETGYIQRRLVKAMEDIMVKYDGTVRNSLGDVIQFLYGEDGMDAVWIESQKLDSLKMKKSEFDRTFKYEIDDVNWNPTYLSDEHLDDLKGIRELRDVFDAEYQKLEADRYQLGTEIATNGDSTWPLPVNIKRHIWNAQKTFKIDLRKISDMHPVEIVDAVDKLQERLLVVPGDDALSVEAQKNATLFFNILLRSTLASKRVLEEYRLSREAFEWVIGEIESRFVQSLVAPGEMIGCVAAQSIGEPATQMTLNTFHYAGVSAKNVTLGVPRLREIINVAKRIKTPSLSVYLTPEASRSKEGAKTVQCALEYTTLRSVTQATEVWYDPDPMSTIIEEDYEFVRSYYEMPDEDVSPEKISPWLLRIELNREMMVDKKLSMADIAEKINLVFDDDLTCIFNDDNAEKLILRIRIMNDEGGKGEGQDESAEDDVFLKKIESNMLTEMALRGIPDINKVFIKQVRKSKFDEEEGFKTSEEWMLDTEGVNLLAVMCHEDVDPKRTTSNHLIEIMEVLGIEAVRRALLDELRVVISFDGSYVNYRHLAILCDTMTYRGHLMAITRHGINRNDTGPLMRCSFEETVDILLDAAAYAETDCLRGVTENIMLGQLAPIGTGDCELYLNDEMLKNAIELQLPSYMDGLEFVGMTPARSPFSGTPYHESIMMTPNYLSTPNVSDAQFSPYVSGMAFSPSSSPGYSPASPGQSPASPGYSPTSPYYSPTSPIYSPTSPIYRPTYSPTSPTYNPTSYSPTSPTYSPTSPYYSPTSPTYSPTSPYYSPTSPTYSPTSPYYSPSSPGSSPTSPSYSPTSPSYYSRTSRTYSPTSPAYSPTSPSYIATSPSYSPTSPSYGPTPYSPTSPGYSPTSPSYSPTSPSYGSTSPSYNPQSAKYCPSLAYSPNNARLSPASPYTLHRHLTLPHLHRIHLLVQHTVPGSSLIHFNLPYSSGASPDYSPNAGYSPTLPGYSSSSTGQYTPHEGYENDKTGKDASKDAGHVEKREERAFQKHLHSGYLCDTVFLKYQKLYPQMLHLALGLLLAMAEKVSDDVMLLHGDLDLKIVQARRLPNMDLFSDRMRRCFTACNSCAKPPEDDEDPRNRDGGDRNIRGHRKVITSDPYVTVVVPQATLARTRVLKNSQDPLWDEHFNISVAHPMPHLEFQVKDDDVFGAQIIGTAKIPVHQIASGQRISGWFPVLGASGKPPKKETALYVDMKFTPFHQIEAYRNGIAGDPDRRGVKRTYFPVRKGSKVRLYQDAHVMDGTLPEVGLDNGKVYKHGKCWEDICYAVSEAHHMIYIVGWSVFHKVRLVREPTRKLPRGGDLTLGELLKYKSEEGVRVLLLVWDDKTSHDKFGISTPGVMGTHDEETRKFFKHSSVICVLSPRYATDLGLVVGTLFTHHQKCVLVDTQAVGNNRKITAFIGGIDLCDGRYDTPEHRILHDLDTVFKDDFHNPTFPAATKAPRQPWHDLHCRLDGPAAYDVLINFEQRWRKATRWKEFSLRLKGKTHWQDDALIRIGRISWILSPVFKFLKDGTSIVPEDDPVVYVSKEDDPENWHAQVFRSIDSGSVKGFPKYEDEAEAQNLECAKRLVVDKSIQTAYIQTIRSAQHFIYIENQYFLGSSYAWPNYKDAAGADNLIPMELALKIVSKIRAKERFAVYVVIPLWPEGDPKSGPVQEILYWQSQTMQMMYDVIVRELKAVQSDAHPLDYLNFYCLGKREQLPENMPATNGSAVSDSYKFQRFMIYVHAKGMIVDDEYVLMGSANINQRSMAGTKDTEIAMGAYQPHHTWTNKGRHPRGQVYGYRMSLWAEHLGKTGDEFVEPSDLECVKNVNEIAEGNWKKFTNIEFSELQGHLIKYPLQVDSDGKVSSLPDYDSFPDVGGKIIGAHSMALPDTLTT

SEQ ID NO: 474 - protein, 865 aa, Brassica napus
MANVKQSGLVYLHGDLELQIIEARYLPNMDLHFERIRRVFNTLNLFDKHSSSPKGSHRRTRNNIITSDPYVTVCLAGATVARTRVISNSQNPVWSEHFKIPLAHPVSQIEFYVKDNDVFGADLIGIATVSTAKIKLGETINGWFPIIGSPKPDSAVRLEMRFVPYEKNPLYNHGITSTGVANCYFPVRTGGHVTLYQDAHVHDNMPEIELEDGVLYQHERCWEDICHSILEAHHMVYVIGWSIFHKVKLVRDQSRKLPNGGDLSLGDLLKYKSQEGVRVLLLVWDDRTSHSKFFINTTGVMQTHDEETRKFFRRSSVTCVLSPRYASSKLSIFKQQVVGTVFSHHQKCVIVDTQASGNNRKIAAFIGGLDLCDGRYDTPEHRLFKGLDTVFQGDYHNPTFSGGTKAPRQPWHDLHCKIEGPAAYDILINFEQRWKKATKWSEIGQKFKRVTRWHDDSLIKLERISWILSPSTAVPTNDTLWVSKDDDKQNWHVQVFRSIDSGSLKGFPKDVHKAHAQNLVCAKNLVIEKSIQTAYIQAIRSAQHFIYIENQYFIGSSFVWPNYKEAGADNLVPIELALKIATKIRARERFAVYIVIPMWPEGDPSSAPVQEILYWQGQTMQMMYEIIAREIKHMDLENVNPQDYLNFYCLGNREELPSDQNCVSSSGEMVPASQKWGRFMIYVHAKGMVVDDEYVLLGSANINQRSIAGSRDTEIAMGAYQNHQTWSHRSKHPRGQVYGYRMSLWAEHMGKIDDIFKEPETLECVKRVNMISEDNWKKYTDDSFVPLQGHLLKYPLSVDHTGKVIPLSGFNSFPDVGGKILGTQRLLSPHNSTRTLACYIYICAKPIICSLYTKFGTLVSFRLSA

SEQ ID NO: 475 - protein, 758 aa, Brassica napus
MELEEQKKFFHGTLEITIFDATPFSPTFPFNCICTKPRPAYVTVKLNKKKVAKTSSEHDRVWNQTFQILCAHPVSDTTITITLKTHCSVLGRFRISAEQILTSNTAIVNGCFPLTTNNGSTKPNLKLKCMIWFRPAYLEPGWCKTLEGEPFQGIKNASFPQRSNCRVVLYQDAHHKATFDPRVHDVPCNARNLWEDVYKAIDCARHLVYIAGWALNPNLVLVRDDETEIPHAVGVTIGELLKRKAHEGVAVRVMLWNDESSLPMIKNRGVMRTNDQTALAYFRDTSVVCRLCPRSHKKLPTAFAHHQKTITVDTRVTNTNTKEREIMSFLGGFDLCDGRYDTEEHSLFRTIGTSDDFYQTSLAGAKLSRGGPREPWHDCHVCVVGPAAWDVLKNFEQRWTKQCNPSVLVNTSGIRNLVSSANTEEDDRNWNVQVLRSIDHVSATEMPRGLQVERSVHDGYVAAIRKAERFIYIENQYFMGGCEHWEGKSGSGCTNLIPVEIALKIAAKIRERERFAVYIVIPMWPEGPPESETVEEMLHWTRETMSMMYKIIGEAIWETGDGSHPRDYLNFFCLANREEKREGEYEAVSSPHPKTQYWNAQRNRRFMVYVHSKIMIVDDAYVLIGSANINQRSMDGCRDTEIAIGCYQRNTTKTNEIRAYRLSLWYEHTGGQITVDELSFSEPESLECVRGLRTMGEQMWDIYSGEKVVDMNGVHLVAYPISVTRDGVVEEIGDGVFPDTKTLVRGKRSKMLPPVLTT

SEQ ID NO: 476 - protein, 1047 aa, Brassica napus
MSTEKLLATNGVKSDGVIRRTAATANCLTGGSQIFEELPKAKIVSVSRPDTTDFSPLLLSYTLELQYKQFKWTLQKKASQVLYLHFALKKRLIIEELHDKQEHVREWLHSLGIFDMQGSVVQDDEEPDDGALPLHYTEDSVKNRNVPSRAALSIIRPTIGRSETVVDRGRAAMKGYLNLFLGNLDIVNSKEVCKFLEVSRLSFAREYGSKMKEGYVTVKHLREVPGSDGGRCCLPSQCLGCFGNSWAKVWAVLKPGFLALLEDPFSGKLLDIMVFDSLGFQGTKESPEQPRLAEQVKERNPLRFGFKVTSGDRTVRLRTTSCRKVKEWVKAVDEAGSYNPHRFGSFAPPRGLTSDGSQAQWFVDGHTAFEAIAFAIQNATSEIFITGWWLCPELYLKRPFQDHPSLRLDALLETKAKQGVKIYILMYKEVQIALKINSMYSKKRLQNIHKNVKVLRYPDHLSTGIYLWSHHDKIVIVDYQVCFIGGLDLCFGRYDTAEHKVGDCPPHIWPGKDYYNPRESEPNSWEETMKDELDRRKYPRMPWHEVHCALWGPPCRDVARHFVQRWNHSKRNKAPNEQTIPLLMPHHHMVLPHYLGTREIDIISTAKPEEDPNKPVVLSRQDSFSSASPPQDIPLLLPQETDADFATIGDIKFERGSRQALDGRDEYPGETSEESDRDETVNEWWWQIGKQSDCKCQIIRSVSQWSAGTNQPEDSIHQAYCSLIENAEHFIYIENQFFISGLEKDDTILNRVSEALYRRILKAHEENKCFRVVIVIPLLPGFQGGIDEFGAATVRALMHWQYRSISRDRTSILYNLKALLGPKTQDYISFYGLRSYGRLFEDGPIATSQIYVHSKLLIVDDRIAVIGSSNINDRSLLGSRDSEIGVVIEDKEFVESSMNGVKWMAGKFSYSLRCSLWSEHLGLQPGKVKMIEDPIKDATYQDLWMATAKRNTDIYDKVFSCIPNENIRSKAALRHNVALCKDKLGHTTIDLGIAPEKLKPCDSDSWEMLKETRGHLVCFPLHFMCNEEDLRPGFVETEFYTAPQVFH

SEQ ID NO: 477 - protein, 1082 aa, Brassica napus
MASEQLMSPAGGGGRYFQMQPEQIPSMVSSLFSFAPAPTQEANRIFEELPKAVIVSVSRPDASDISPFKWQLVKKASQVFYLHFALKKRAFIEEIHEKQEQVKEWLQNLGIGDHAPIVQDEDVDEVQLHQEESAKNRDVPSSAALPVIRPLGRQQSISVRGKHAMQEYLNHFLGNLDIVNSREVCRFLEVSMLSFSPEYGPKLKEDYIMVKHLPKISKSDDSDRCCGCCWFCCCNDNWQKVWGVLKPGFLALLEDPFDPKLLDIIVFDVLPVSNGNDGADVSLAVELKDHNPLRHAFKVTSGNRSIRIRAKSSAKVKDWVASINDAALRPPEGWCHPHRFGSFAPPRGLTDDGSQAQWFVDGGAAFAAMAAAIENAKSEIFICGWWVCPELYLRRPYDSHTSSRLDNLLENKAKQGVQIYILIYKEVALALKINSVYSKRRLLSIHENVRVLRYPDHFSSGVYLWSHHEKLVIVDHQVCFIGGLDLCFGRYDTFEHKVGDNPSVTWPGKDYYNPRESEPNTWEDALKDELDRRKYPRMPWHDVHCALWGPPCRDVARHFVQRWNYAKRNKAPYEDSIPLLMPQHHMVIPHYMGRQEESDIECKNDEDSIKGIRREDSFSSGSSLQDIPLLLPQEPVDEDGSSRGHKANGTNSRNGPFSFRKSKIEPVVGDTPMRGFVDDRNGLHLPVAKRGSNSIDSEWWETQERGYQVGSPDESGQVGPRTSCRCQIIRSVSQWSAGTSQVEESIHSAYRSLIDKAEHFIYIENQFFISGLSGDDTIKNRVLEALYKRILRAHNEKKSFRVVVVIPLLPGFQGGIDDSGAASVRAIMHWQYRTMYRGHNSILNNLYKTVGPKANDYISFYGLRAYGKLSEDGPVATSQVYVHSKIMIIDDRAALIGSANINDRSLLGSRDSEIGVLIEDKELVDSRMAGKPWKAGKFSLSLRLSLWSEHLGLRSGEIDQIIDPVSDSTYKEIWMATAKTNTMIYQDVFSCVPNDLIHSRMAFRQSISYWKEKLGHTTIDLGIAPEKLESYHNGDIKRSDPMDRLKSIKGHLVSFPLDFMCKEDLRPFFNESEYYASAQVFH

SEQ ID NO: 478 - protein, 995 aa, Brassica napus
MYKTTSSSLLRAASSRSPLLSSRSSLSQSSSSSAASASPSPPSSLLGRRPFATSSPAFRSLPRWSHCLHSRLSPFRLSSQIRAVSPGLDRLERKFSSMASEHPFKGIFTTLPKPGGGEFGKFYSLPALNDPRIDKLPYSIRILLESAIRNCDNFQVTKEDVEKIIDWEKTAPKQVEIPFKPARVLLQDFTGVPAVVDLACMRDAMNKLGSDSNKINPLVPVDLVIDHSVQVDVARSENAVQANMELEFQRNKERFAFLKWGSTAFQNMLVVPPGSGIVHQVNLEYLGRVVFNTQGVLYPDSVVGTDSHTTMIDGLGVAGWGVGGIEAEATMLGQPMSMVLPGVVGFKLSGKMRNGVTATDLVLTVTQILRKHGVVGKFVEFYGDGMSGLSLADRATIANMSPEYGATMGFFPVDHVTLQYLKLTGRSDETVAMIEAYLRANNMFVDYDEPQQDRAYSSYLELNLDNVEPCISGPKRPHDRVPLKEMKADWNSCLDSKVGFKGFAIPKEAQEKVANFSFNGKPAEITHGSVVIAAITSCTNTSNPSVMLGAGLVAKKACDLGLQVKPWIKTSLAPGSGVVTKYLLKSGLQEYLNQQGFNIVGYGCTTCIGNSGEINESVGAAITENDIVAAAVLSGNRNFEGRVHPLTRANYLASPPLVVAYALAGTVNIDFETEPIGTGKNGKDVFLRDIWPTTEEIAEVVQSSVLPDMFRATYESITKGNPMWNELSVPENTLYSWDPKSTYIHEPPYFKDMTMDPPGPHSVKDAYCLLNFGDSITTDHISPAGNIQKDSPAAKYLMERGVDRKDFNSYGSRRGNDEIMARGTFANIRIVNKLMNGEVGPKTVHIPSGEKLSVFDAAMRYKSSGEDTIILAGAEYGSGSSRDWAAKGPMLQGVKAVIAKSFERIHRSNLVGMGIIPLCFKSGEDADTLGLTGHERYTIHLPTDISEIRPGQDVTVTTDNGKSFSCTVRFDTEVELAYFNHGGILPYVIRNLSKQ

SEQ ID NO: 479 - protein, 367 aa, Brassica napus
MAVKKASEMFSKSLIEDVHRWGCMKQTGVSLRYMMEFGSTPTERNLLISAQFLHKELPIRIARRAIELETLPYGLSEKPAVLKVRDWYVESFRDMRAFPEIKDTADEKEFTQMIKAVKVRHNNVVPMMALGVNQLKKGMKLYEKLDEIHQFLDRFYLSRIGIRMLIGQHVELHNPNPPLHTVGYIHTKMSPMEVARNASEDARSICFREYGSAPEINIYGDPSFTFPYVPTHLHLMVYELVKNSLRAVQERFVDSDRVAPPIRIIVADGIEDVTIKVSDEGGGIPRSGLPKIFTYLYSTARNPLEEDVDLGTADVPVTMAGYGYGLPISRLYARYFGGDLQIISMEGYGTDAYLHLSRLGDSQEPLP

SEQ ID NO: 480 - protein, 346 aa, Glycine max
MNGGATTATFRSILDKPLNQLTEDDISQLTREDCRRFLKEKGMRRPSWNKSQAIQQVISLKALLEPSDDDTPPPPPPAMHHRSHAQPQPQVNLSEPPPPPPKAPPPEEPAFHAAEDIQKSASSGEKPTETNDTNTNVASPKGCATSGSFGQMTIFYCGKVNVYDRVSPDKARAIMQLATSPVQLTQDDPLNGNAAVWTSPCHLPMDKDVLVPVDTTILQVAQADKMVEYPLQYREKGSIARDADVEGQEHRKVSLQRYLEKRKDRGRLKGKKLTGITSSNFEMYLNLPVKVHSSNGNSSRSSTSSPPQPRLPLVSSGSDQLKVALPIDLNDKVSLQMFKNAKIQTR

SEQ ID NO: 481 - protein, 344 aa, Glycine max
MNGGATTATFRSILDKPLNQLTEDDISQLTREDCRRFLKEKGMRRPSWNKSQAIQQVISLKALLEPSDDDTPPPPPPAMHHRSHAQPQPQVNLSEPPPPPPKAPPPEEPAFHAAEDIQKSASSGEKPTETNDTNTNVASPKGCATSGSFGQMTIFYCGKVNVYDRVSPDKARAIMQLATSPVQLTQDDPLNGNAAVWTSPCHLPMDKDVLVPVDTTILQVAQADKMVEYPLQYREKGSIARDAEGQEHRKVSLQRYLEKRKDRGRLKGKKLTGITSSNFEMYLNLPVKVHSSNGNSSRSSTSSPPQPRLPLVSSGSDQLKVALPIDLNDKVSLQMFKNAKIQTR

SEQ ID NO: 482 - protein, 337 aa, Glycine max
MNGGATTATFRSILDKPLNQLTEDDISQLTREDCRRFLKEKGMRRPSWNKSQAIQQVISLKALLEPSDDDTPPPPPPAMHHRSHAQPQPQVNLSEPPPPPPKAPPPEEPAFHAAEDIQKSASSGEKPTETNDTNTNVASPKGCATSGSFGQMTIFYCGKVNVYDRVSPDKARAIMQLATSPVQLTQDDPLNGNAAVWTSPCHLPMDKDVLVPVDTTILQVAQADKMVEYPLQYREKGSIARDADVEGQEHRKVSLQRYLEKRKDRGRLKGKKLTGITSSNFEMYLNLPVKVHSSNGNSSRSSTSSPPQPRLPLVSSGSDQLKVALPIDLNDKDVQEC

SEQ ID NO: 483 - protein, 335 aa, Glycine max
MNGGATTATFRSILDKPLNQLTEDDISQLTREDCRRFLKEKGMRRPSWNKSQAIQQVISLKALLEPSDDDTPPPPPPAMHHRSHAQPQPQVNLSEPPPPPPKAPPPEEPAFHAAEDIQKSASSGEKPTETNDTNTNVASPKGCATSGSFGQMTIFYCGKVNVYDRVSPDKARAIMQLATSPVQLTQDDPLNGNAAVWTSPCHLPMDKDVLVPVDTTILQVAQADKMVEYPLQYREKGSIARDAEGQEHRKVSLQRYLEKRKDRGRLKGKKLTGITSSNFEMYLNLPVKVHSSNGNSSRSSTSSPPQPRLPLVSSGSDQLKVALPIDLNDKDVQEC

SEQ ID NO: 484 - protein, 350 aa, Glycine max
MNGGATTATFRSILDKPLNQLTEDDISQLTREDCRRFLKEKGMRRPSWNKSQAIQQVISLKALLEPSDDDTPPPTAMHHRSHAPPPPPQPQSQVNLTEPPPPPKAPPPEESSFHAAEDIQKPASSGEKPSETNDTNTNVASPKGCATSGSFGQMTIFYCGKVNVYDGVSPDKARAIMQLAVSPVQFTQDDPSNGNAAVWPSPCHLPMDKDVLIPVDTTILQVAQSDKMMEYPLQYREKGSIARDADVEGQASRKVSLQRYLEKRKDRGRLKGKKLTGITSSNFEMYLNLPVKVHASNGNSSRSSTSSPPQPRLPLVSSGSADNQLKVALPIDLNDKVSLQMFKNAKTLTR

SEQ ID NO: 485 - protein, 341 aa, Glycine max
MNGGATTATFRSILDKPLNQLTEDDISQLTREDCRRFLKEKGMRRPSWNKSQAIQQVISLKALLEPSDDDTPPPTAMHHRSHAPPPPPQPQSQVNLTEPPPPPKAPPPEESSFHAAEDIQKPASSGEKPSETNDTNTNVASPKGCATSGSFGQMTIFYCGKVNVYDGVSPDKARAIMQLAVSPVQFTQDDPSNGNAAVWPSPCHLPMDKDVLIPVDTTILQVAQSDKMMEYPLQYREKGSIARDADVEGQASRKVSLQRYLEKRKDRGRLKGKKLTGITSSNFEMYLNLPVKVHASNGNSSRSSTSSPPQPRLPLVSSGSADNQLKVALPIDLNDKDVQEC

SEQ ID NO: 486 - protein, 339 aa, Glycine max
MNGGATTATFRSILDKPLNQLTEDDISQLTREDCRRFLKEKGMRRPSWNKSQAIQQVISLKALLEPSDDDTPPPTAMHHRSHAPPPPPQPQSQVNLTEPPPPPKAPPPEESSFHAAEDIQKPASSGEKPSETNDTNTNVASPKGCATSGSFGQMTIFYCGKVNVYDGVSPDKARAIMQLAVSPVQFTQDDPSNGNAAVWPSPCHLPMDKDVLIPVDTTILQVAQSDKMMEYPLQYREKGSIARDAEGQASRKVSLQRYLEKRKDRGRLKGKKLTGITSSNFEMYLNLPVKVHASNGNSSRSSTSSPPQPRLPLVSSGSADNQLKVALPIDLNDKDVQEC

SEQ ID NO: 487 - protein, 296 aa, Glycine max
MNGGATTATFRSILDKPLNQLTEDDISQLTREDCRRFLKEKGMRRPSWNKSQAIQQVISLKALLEPSDDDTPPPTAMHHRSHAPPPPPQPQSQVNLTEPPPPPKAPPPEESSFHAAEDIQKPASSGEKPSETNDTNTNVASPKGCATSGSFGQMTIFYCGKVNVYDGVSPDKARAIMQLAVSPVQFTQDDPSNGNAAVWPSPCHLPMDKDVLIPVDTTILQVAQSDKMMEYPLQYREKGSIARDAVKVHASNGNSSRSSTSSPPQPRLPLVSSGSADNQLKVALPIDLNDKDVQEC

SEQ ID NO: 488 - protein, 807 aa, Glycine max
MAQILLHGTLHATIYEVDKLKIGGGNFLTKIVQNIEETVGIGKGVTKLYATIDLEKARVGRTRIIEKEIKNPRWYESFHIYCAHMASNIIFTVKDDNPIGATLIGRAYVPVQEILHGEEIDRWVEILDEHKNPIHGHSKIHVKLQYFDVSKDRNWALGIRSPKFPGVPYTFFSQRRGCKVSLYQDAHVPDNFVPKIQLSGGQTYQAHRCWEDVFDAITKAQHLIYITGWSVYTEISLVRDSRRPKPGGDETLGELLKKKAREGVRVLMLVWDDRTSVPLLKKDGLMATHDQETEEYFRGTEVHCVLCPRNPDDGGSFVQDLEISTMFTHHQKIVVVDGELPSGDSNKRRIVSFVGGIDLCDGRYDTQFHSLFRTLDTAHHDDFHQPNFGGSSIKKGGPREPWHDIHSRLEGPIAWDVLFNFEQRWRKQGGKDLLVPLRDLEDVIIPPSPVTYIDDHETWNVQLFRSIDGGAAFGFPETPEDAARVGLVSGKDNIIDRSIQDAYVNAIRRAKNFIYIENQYFLGSSYDWSADGIKPEAIDALHIIPKELSLKIVSKIEAGERFSVYVVVPMWPEGVPESASVQAILDWQRRTMDMMYKDVVQALRAKGIVENPRNYLTFFCLGNREVKKQGEYEPPERPDPDTDYIRAQEARRFMIYVHAKMMIVDDEYIIVGSANINQRSMDGARDSEIAMGAYQPFHLAARQPARGQIHGFRMSLWYEHLGLLHDSFLHPENEECIKKVNQIADKYWDIYSSESLEHDLPGHLLRYPIGVSNEGVVTELPGFEFFPDTKARVLGDKVDYLPPILTT

SEQ ID NO: 489 - protein, 711 aa, Glycine max
MTQILLHGTLQVTIYELDNLKAGSGGNILTKLVHNIEETIGIGKGITKLYATIDLEKARVGRTRIIEKEHTNPKWYESFHIYCAHMASSIIFTVKDDNPIGATLIGRAYRQGCKVSLYQDAHVPDNFVPKIPLAGGHTYQPHRCWEDVFDAINNAQHLIYITGWSVYTEITLVRDSRRPKRRRCNTWVLMLVWDDRTSVPLLKEDGLMATHDEDTENYFYDSEVHCVLCPRNPDDGGSVVQDVEIFSMFSHHQKIVVVDSALPNGRSDKRRIVSFVGGIDFCDGRYDTQFHSLFRTLGTVHHDDFHQPNFSHTSIKKGGPREPWHDIHSRLEGPIAWDVLFNFEQRWKKQGGKDLLIPPKDLENVIIPPSVVTYPEDHEAWNVQLFRSIDGGAAFGFPETPEEAARSGLISGKDNIIDRGIQDAYIKAIRRAKNFIYIENQYFLGSCYAWSADGIKPEDIGALHLIPRELSLKIVSKIEAWERFSVYIVVPMWPEGYPEKGTVQAILDWQRRTMDMMYKDVVGALKGKGNEEDPLNYLTFFCLVNRELKKEGEYVPPERPDPHTDYMRAQVSRRFMIYVHAKMMIVDDEYIIIGSANINQRSMDGARDSEVAMAAYQPYHLATKQPARGQIHGFRMSLWYEHLGLLHDSFLHPESEECIEKQDLPGHLLRYPVAISSQGNVTQLQAFEFFPDTKAPILGAKSDYIPPILTT

SEQ ID NO: 490 - protein, 788 aa, Glycine max
MAQILLHGTLHATVFEVDRLNAGGGGGNFFSKLKQNFEETVGIGKGVTKLYATIDLEKARVGRTRIIENEHTNPRWYESFHIYCAHMASNIIFTVKDDNPIGATLIGRAYVPVSEVLDGEEIDRWVEILDEEKNPIQEGSKIHVKLQYFDVTKDRNWARGIRSPKFPGVPYTFFSQRQGCKVSLYQDAHVPDNFVPKIPLAGGKNYEAHRCWEDIFDAITNARHFIYITGWSVYTEISLVRDSRRPKPGGDQTLGELLKKKANEGVKVLMLVWDDRTSVGTEVHCVLCPRNPDDGGSIVQDLQISTMFTHHQKIVVVDGAMPGEGSDRRRIVSFVGGIDLCDGRYDTAFHSLFRTLDTAHHDDFHQPNFPGAAITKGGPREPWHDIHSRLEGPIAWDVLFNFEQRWRKQGGKDVLVPLRELEDVIIPPSPVTFPEDHETWNVQLFRSIDGGAAFGFPETPEDAARAGLISGKDNIIDRSIQDAYINAIRRAKNFIYIENQYFLGSSFAWSADDIKPEDIGALHLIPKELSLKIVSKIEAGERFAVYVVVPMWPEGVPESASVQAILDWQKRTMEMMYKDIIQALRAKGIDEDPRNYLTFFCLGNREVKKPGEYEPSEQPDPDSDYQRAQEARRFMIYVHTKMMIVDDEYIIVGSANINQRSMDGARDSEIAMGAYQPYHLATRQPARGQIHGFRMSLWYEHLGMLHDSFLQPESDECINKVNQVADKYWDLYSNESLEHDLPGHLLRYPIGVASEGDVTELPGFEFFPDTKARILGGKADYLPPILTT

SEQ ID NO: 491 - protein, 809 aa, Glycine max
MAQILLHGTLHATIFEVDRLNAGGGGGNFFSKLKQNFEETVGIGKGVTKLYATIDLEKARVGRTRIIENEHTNPRWYESFHIYCAHMASNIVFTVKDDNPIGATLIGRAYVPVSEVLDGEEIDRWVEILDEEKNPIHEGSKIHVKLQYFDVTKDRNWARGIRSPKFPGVPYTFFSQRQGCKVSLYQDAHVPDNFVPKIPLAGGKNYEAHRCWEDIFDAITDAKHFIYITGWSVYTEISLVRDSRRPKPGGDQTLGELLKKKASEGVKVLMLVWDDRTSVGLLKKDGLMATHDEETAQFFDGTEVHCVLCPRNPDDGGSIVQDLQISTMFTHHQKIVVVDGAMPGGGSDRRRIVSFVGGIDLCDGRYDTAFHSLFRTLDTAHHDDFHQPNFPGAVITKGGPREPWHDIHSRLEGPIAWDVLFNFEQRWRKQGGKDVLVPLRELEDVIISPSPVTFLEDHETWNVQLFRSIDGGAAFGFPETPEDAARAGLISGKDNIIDRSIQDAYINAIRRAKNFIYIENQYFLGSSFAWSADDIKPADIGALHLIPKELSLKIVSKIEAGERFAVYVVVPMWPEGVPESASVQAILDWQKRTMEMMYRDIIQALRAKGIEEDPRNYLTFFCLGNREVKKPGEYEPSEQPDPDSDYQRAQEARRFMIYVHTKMMIVDDEYIIVGSANINQRSMDGARDSEIAMGAYQPYHLATRQPARGQIHGFRMSLWYEHLGMLHDSFLQPESEECINKVNQVADKYWDLYSSESLEHDLPGHLLRYPIGIASEGDVTELPGFEFFPDTKARILGGKADYLPPILTT

SEQ ID NO: 492 - protein, 826 aa, Glycine max
MPHLLHGRLDVIIYEVDTLPTLNDCNLNLCSKGTSRSVGKRFLSQLKSCFLCQCQCQPEFVETGLYATIDLDKARVGRTKLLNDQSSNPTWDETFHVYCAHLISHVIFTVKQKDPIDATLIGRAYVPVEQVVNGNIVDEWVQILDEDHNPIPSESKIHVKMQFSSVRNDINWSQGIRSPRFQGVPHTFFSQKNGCKVTLYQDAHVSDGFVPWIPLSGGKPYEHRKCWEDIYNAIMDARNFIYITGWSVYSEITLIRDPMKPTTRITLGELLKMKAEEGVKVLMLVWDDRTSVPDFKKDGLMATHDQETADYFKNTKVKCVLCPRNPDDGKSIVQGFETSTMFTHHQKTIVVDTQVAMGQQGQKRTIVSFVGGIDLCDGRYDTQEHPLFSTLDTVHKDDFHQPNFPGASIKKGGPREPWHDIHCKLEGSVAWDVLYNFQQRWEKQVGNQLLFSSSKLDEYFVPRSTVVTTNENETWNVQLFRSIDGGAASGFPPDPEEAAELGLVSGKDNIIDRSIQDAYISAIRRAKNFIYIENQYFLGSSYGWQASDIVVEDIGALHLIPKELSLKIVSKIEAGERFSVYVVIPMWPEGIPESGSVQAILDWQRRTMEMMYADIAKAIQRKRIQANPRDYLTFFCLGNREGKKDMEYTPTEAPEPDTDYARAQKARRFMIYVHAKMMIVDDEYIIIGSANINQRSMDGERDTEIAMGAFQPRHIAYNGAPRGQIYGFRRALWCEHLGDHGDTNIFDNPESVDCIRLVNHLAETNWDIYSKETFDEYREFHHLMRYPIEVTNNGAITILQGLEHFPDTKAKILGSQSVYLRPILTT

SEQ ID NO: 493 - protein, 821 aa, Glycine max
MPQLLHGTLKVTIFEVDRLHTGCHLDFCQKGTTHKGKRFLAQVKGCLLCRPEIVGTRLYATIDLDKARVGRTRMIGNQPSHPRWNETFEIYCAHQISKIIFTVKDGNPIGATLIGRASVPVEQVRKGPIVKRWVEILDEEDQRPVPGHAKICVSVQFYDVTDDTTCLWSQGISMPFFGVPRTFFNQREGCNVTLYQDAHVPRGIGVVPYIPISEEKDYMPAMCWEDINKAINEAKYFIYITGWAVYTEITLVRDKDESETLGELLKRKADQGVKVLLLIWNDRTSVPELKDGFMATHDQETAGYFRGTKVQCVLCPRNPDDGRSIVQGLKTSTMFTHHQKSVVVDGHVVGSEKRSVISFIGGIDLCDGRYDTRDHPLFSTLNTMHRNDFHQPTFPNASIDKGGPREPWHDIHCKLEGPIAWDVLYNFEQRWEKQVGKKLLYSLDDLDEILVHPSEAQKSEVGVEETWNVQLFRSIDGGAASGFPQTPKEVSELGLVSGKDNVIERSIQDAYIHAIRRAKNFIYIENQYFLGSSYGWQASGDIVVEDIGALHLIPKEISLKIASKIEAKERFSVYIVIPMWPEGVPSSDSVQAILDWQKRTMEMMYSDITDALKKTGIQARPRDYLTFFCLGKRENKDPGDYTPLEKPEPDSDYGRAQNSRRFMIYVHSKMMIVDDEYIIVGSANINERSMEGARDTEIAMGAFQPRHLASSGRPKGEIYRFRRALWYEHLGDDGFGSKIFDFPEHLECINHVNKLAEANWDMYSMETFVENKRQFHHLMCYPIQVTNDGAITNLPGFEYFPDTKARILGCKSKLIPSILTT

SEQ ID NO: 494 - protein, 1106 aa, Glycine max
MDNYGSSSPYRYPSPYMYPPNPHQPYPPPPGSAPDPYAQHVPYQPYPYLSSHSFNYSYPPPPRPSSHSGHFEYSYTPPPHPSDFPYPPPPYYAHPPSYPYPYHVPPPNHDPSKPSLSYHASFQHGSSHYYYQQPNQAYSASAPEVQPDIHSHTNSYSGPYWQENTSTAADEVSQASDSSKPSQGSAYPPLDDLMSNVRLSDGQPTAPASPPAPARQPFMHSISVPKLQQKREEFYGYSNNSFSGWGSSYHSQVDSSRLSDFSGSFNESMHSQSLQIVPVQNKGSLRVLLLHGNLDIWIHEAKNLPNMDMFHKTLGDMFGKLPGSVGNKIEGTMNKKITSDPYVSISVSNAVIGRTYVISNSENPVWLQHFYVPVAYHAAEVHFLVKDNDIVGSQLIGIVAIPVEQIYSGAVVEGTFPILNNNGKPCKQGAVLTLSIQYIPMEKLSIYHQGVGAGPEYIGVPGTYFPLRRGGTVTLYQDAHVPDGSLPNVLLDSGMYYVNGKCWQDIFDSISQARRLIYITGWSVWHKVRLVRDAAGYASDYTLGDLVKSKSQEGVRVLLLIWDDPTSRSIFGYKTDGVMATHDEETRRFFKHSSVQVLLCPRSGKRHSWIKQKEVGTIYTHHQKTVIVDADAGNNRRKIIAFVGGLDLCDGRYDTPHHPLFRTLNTIHKDDYHNPTFTGNIGGCPREPWHDLHSKIDGPAAYDVLTNFEERWLKASKPHGIKKLKISYDDALLRLERIPDVIGINDAPSVGEDNPEVWHVQIFRSIDSNSVKGFPKDPKDATSKNLVCGKNVLIDMSIHTAYVKAIRAAQHYIYIENQYFIGSSYNWSQHKDLGANNLIPMEIALKIAEKIKANERFAVYVVIPMWPEGVPTGAATQRILFWQNKTMQMMYETIYKALVEAGLEAAFSPQDYLNFFCLGNREAMNLYDNAGVTGAPPPANSPQAASRNSQRFMIYVHSKGMIVDDEYVILGSANINQRSMEGTRDSEIAMGAYQPHHTWARKQSYPHGQIHGYRMSLWAEHTGTIEECFLQPESLECVRRVKAMGEMNWKQFSAKEATEMKGHLLKYPVEVDRNGKVRPLQDCEEFPDVGGKIVGSFLAMKENLTI

SEQ ID NO: 495 - protein, 1097 aa, Glycine max
MDNYGSSSPYRYPNQYMYPPNPHQPYPPPPGSAPDPYAQHVPYQPYPYLSSHSFNYSYPPPPRSSSHSGHFEYSYPPPHPPPSYANPPYPYPYHVPPPNHDPPKPSLSHHASFQHEPSHYYYQQPNDAYSASAPQVHPDVHLRTNSFSGPYWHENTSTAGDEVSQTSDNSKPSQGSAYPSLDDLMSNVRLSDDQPTAPASPPAPAGQPFMHSISVPKLQQKREEFYGYSNNSFSGWGSSYHSRVDSSRLSDFSGSFNESVHSQSLQIVPVQNKGSLRVLLLHGNLDIWVHEAKNLPNMDMFHKTLGDMFGKLPGSVGNKIEGTMNKKITSDPYVSISVSNAVIGRTYVISNSENPVWLQHFYVPVAYHAAEVHFLVKDSDIVGSQLIGIVAIPVEKIYSGEVVEGTFPILNNNGKPCKQGAVLTLSIQYIPMEKLSIYHQGVGAGPEYIGVPGTYFPLRRGGTVTLYQDAHVPDGSLPNVLLDSGMYYVNGKCWQDIFDSISQARRLIYITGWSVWHKVRLVRDAAGYASDYTLGDLLRSKSQEGVRVLLLIWDDPTSRSILGYKTDGVMATHDEETRRFFKHSSVQVLLCPRSGKRHSWIKQKEVGTIYTHHQKTVIVDADAGNNRRKIIAFVGGLDLCDGRYDTPHHPLFRTLNTIHKDDYHNPTFTGNAGGCPREPWHDLHSKIDGPAAYDVLTNFEERWLKASKPHGIKKLKISDDDALLRLERIPDVIGINDAPSVGEDDPEVWHAQIFRSIDSNSVKRFPKDPKDATSKNLVCGKNVLIDMSIHTAYVKTIRAAQHYIYIENQYFIGSSYNWSQHKDLGANNLIPMEIALKIAEKIKANERFAVYVVIPMWPEGVPTGAATQRILFWQNKTMQMMYETIYKALVEAGLEAAFSPQDYLNFFCLGNREAGNLYDNVSMTGAPPPANSPQAASRNSQRFMIYVHSKGMIVDDEYVILGSANINQRSMEGTRDSEIAMGAYQPHHTWARKQSYPHGQIHGYRMSLWAEHTGTIEECFLKPESLECVRRVRAMGEMNWKQFSANEATEMKGHLMKYPVEVDRKGKVRPLQDCEEFPDVGGKIVGSFLAMKENLTI

SEQ ID NO: 496 - protein, 759 aa, Glycine max
MDNYGSLQHPYGYPNPPHDLYAQPPYPYPYPPNPPYTNNFNYSYPPPPPPPHSSSPYSSHIDYSSYPPPPSTSSHGSFDYPMPQPPHTYLYPNEFYSYSSNSSSSLDQEDPSRVSDNSDDSVHSQSLQIVPAQLKGSLRVMLLHGNLDIWVHGATNLPNMDMFHKTLEDMFGRLPGNVQHFYNVPVAHHAAEVHFVVKDSDVVGSQLIGVVAIPVEQIYSGNGKPCKPGAVLTVSIQYIPMEKLTIKGGTVTLYQDAHVPNGCLPNVVLENGMYCAHGQSKSSEEGVRVLLLVWDDPTSRNILGYKVDGVMATRDEETRRFFKHSSMQVLLCPRIAGKRNSWVKQQFYNFSSGTIYTHHQKTVIVDADAGNNKRKIVAFVGGLDLCDGRYDTPHHPMFRTLQTLHKDDYHNPTFTGNTGGCPREPWHDLHSKIDGPAAYDILKNFEERWLRAAKPKGIQKIRGIISASNAPSVGDDNPESWHVQIFRSIDSNSVKGFPKEPKNASSMNLVCGKNVLIDMSIHTAYVKAIRVAQHYIYIENQYFIGSSYNWSQHKDLGANNLIPMEIALKIAAKIRANERFAGVPTGAATQRILFWQHKTMQMMYETIYKALVEVGLEAAFSPQDYLIFFCLGNREAIDMYENITVSGTPPPANTVIISILIAFSRTNPRFMIYVHSKGMIVDDEYVILGSANINQRSIEGTRDTEIAMGAYQPHHTWARRQYYPRGQGKVRSLPGHEEFPDVGGKIVGSFIAIQENLTI

SEQ ID NO: 497 - protein, 1047 aa, Glycine max
MDNYGSSQHPYGYPNPYSYPPHDPYAQPPYPYPYPYPYPYPHPTNPPHNNNSNYPYPPPPPPPHSSSPYSSPINYSSYPPPPPPPPPPPSTSSHGSFDYPMPQPPHTYPYPHRVPPEWSVTTGGGVSHSHASDSYNPPHSAAYPTLDDLMSNDRLSDNNNLPSAPPLTHSPPILYLDRRDEFYGYSSYSSSSLDQGDPSRLSDNNDDSVNSESLQIVPAQHKGSLRVLLLHGNLDIWVHGAKNLPNMDMFHKTLEDMIGRFPGTVASNKIEGTVSRKITSDPYVTISVSNAVIGRTFVISNSENPVWEQHFYVPVAHHAAEVHFVVKDSDVVGSQLIGVVAIPVEKIYSGQKVQGTYPILNSNGKPCKPGAVLMVSIQYIPMHTLIMYYQGVGAGPDYIGVPGTYFPLRKGGTVTLYQDAHVPDGCLPNVVLDNGVYYAHGKCWLDIFDAINRAKRLIYITGWSVWHKVRLVRDPGNPSKFTLGDILRSKSSEGVRVLLLIWDDPTSRSILGYKVDGVMATHDEETRRFFKHSSVHVLLCPRIAAKRHSWAKQKEVGTIYTHHQKTVIVDADAGNNQRKIVAFVGGLDLCDGRYDTPHHPLFRTLQTLHKDDYHNPTFTGNTGGCPREPWHDLHSKIDGPAAYDILKNFEERWLRAAKPKGIQKLRSSYDDALLKLDRIGDIISSSNAPSVGDDNPESWHVQIFRSIDSSSVKGFPKEPKDASSMNLVCGKNVLIDMSIHTAYVKAIRAAQHYIYIENQYFIGSSYNWSQHKDLGANNLIPMEIALKIAAKIRANERFAVYIVIPMWPEGVPTGAATQRILFWQHKTMQMMYETIYKALVEVGLETAFSPQDYLNFFCLGNREAIDMYENITVSGTPPPANSPQAFSRNNRRFMIYVHSKGMIVDDEYVILGSANINQRSMEGTRDTEIAMGAYQPHHTWARSQYHPRGQIHGYRMSLWAEHTGTIEDCFLQPESLECVSRIRTMGELNWKQFASNDVTEMTGHLLKYPVEVDRKGKVRSLPGHEEFPDVGGKIVGSFIAIQENLTI

SEQ ID NO: 498 - protein, 853 aa, Glycine max
MAHLVYGETPSFGASHHGQAQQIVPFQTTSSSLRILLLHGNLEIWVNEARNLPNMDMFHKKTGEMVSMLSRKLGGKIEGHMSKAGTSDPYVTVSVAGAVIARTFVIRNSENPVWTQHFNVPVAHLASEVHFVVKDSDIVGSQIIGAVGIPVEHLCSGTRVEGFFPILGANGKPCKGGSVLSLSIQYTPVEKVPLYSHGVGAGPDYEGVPGTYFPLRKGGKVTLYQDAHVEEGCLPSLKVDGYVNYKHGSCWHDIFDAISEARRLVYIVGWSVYYNVSLIRDSANGKSYTLGDLLKAKSQEGVRVLLLVWDDPTSKSMLGFKTVGLMNTHDEDTRQFFKNSSVRVLLCPRAGGKGHSWVKTQEAGTIYTHHQKTVIVDADAGQNKRKIKAFIGGLDLCVGRYDTPNHSIFRTLQTTHKDDYHNPNFEGPVTGCPRQPWHDLHSQVDGPAAYDILTNFEERWLRALKMHRFQKMKSSHDDSLLKIDRIPDIVGIDEVPCQNENNRETWHAQVFRSIDSNSVKGFPKEPQDAIRRNLVCGKNVLIDMSIHSAYVKAIRAAQKFIYIENQYFLGSSYNWDSYKDLGANNLIPMEIALKIANKIKQHERFSVYIVIPMWPEGVPTSTATQRILFWQFKTMQMMYETIYKALQEAGLDNKYEPQDYLNFFCLGNREIPDNENVLNDVKTTGENKPQALTKKNRRFMIYVHSKGMIVDDEYVLLGSANINQRSMEGTRDTEIAMGAYQPNHTWAKKQSKPHGQVHGYRMSLWSEHIGAVEECFEEPESLECVRRIRSLSEFNWRQYAAEEVTEMKSHLLKYPLEVDSKGKVKPLFGCEAFPDVGGNISGTFTLLKENLTI

SEQ ID NO: 499 - protein, 866 aa, Glycine max
MADTGDDNGVTYLHGDLDLKIIEARHLPNMDIFSERLRRCVTACDTIKFHSDAPAAADGDGGSQRTRTHHHRRIITSDPYVTVSVPQATVARTRVLKNAQNPVWKEQFHIPLAHPVVDLEFRVKDDDVFGAQSMGTVKVPARRIATGAKISEWFPVLLPSGKPPKPDTALHVEMQFTPVSENLLYQRGIAADPEHNGVRHTYFPVRKGSSVRLYQDAHCTESGEGKIPEIKLENGNVYRHGKCWEDICYAISEAHHMVYLVGWSIYHKVRLVREPTRPLPRGGDLTLGELLKYKSEEGVRVLLLVWDDKTSHDKVFLKTAGVMGTHDEETRKFFKHSSVMCVLSPRYASSKMSFLKQQVVGTVFTHHQKCVIVDTQAAGNNRKITAFIGGLDLCDGRYDTPEHRLFRNLDDVFDGDFHNPTFPAGTRVPRQPWHDLHCRIDGPAAYDVLINFEQRWRKATKWKEFAILFKKTSQWHDDALIRIERISWILSPSGAATLKDKSDYYTVPEDDPLVWVSSEDDPENWHVQIFRSIDSGSLKGFPKRVDIALSQNLICAKNLVIDKSIQTAYIQAIRSAQHFIYIENQYFIGSSYAWPAYKDAGADNLIPMELALKIASKIRAKERFAVYIILPMWPEGDPKTGAMQEILFWQGQTMQMMYDVVARELKSMQLTDVHPQEYLNFYCLGNREHFNEDSSSTNGAQVSTAYKYRRFMIYVHAKGMIVDDEYVIIGSANINQRSMAGTKDTEIAMGAYQPHYTWSAKKRHPHGQIYGYRMSLWGEHLGMLDETFEEPGRLECVEKVNEIAENNWKLFASEDFSLLQGHLLKYPVQVDSDGKIRSLPDCENFPDAGGKILGAHSTTIPDILTT

SEQ ID NO: 500 - protein, 864 aa, Glycine max
MADTGGGDDNGVTYLHGDLDLKIIEARHLPNMDIFSERLRRCVTACDTIKFHSEAPAGGGGAGQRKHHHPRIITSDPYVTVSVPQATVARTRVLKNSPNPVWEEQFNIPLAHPVVDLEFRVKDDDVFGAQTMGTVKVPARRIATGAKISEWFPILLPSGKPPKPDTALHVEMKFTPVWENLLYQRGIAADPEHNGVRHTYFPVRKGSSVRLYQDAHCTESGEGKLPEIKLENGNVYRHEKCWEDICYAISEAHHMVYLVGWSIYHKVRLVREPTRPLPRGGDLTLGELLKYKSEEGVRVLLLVWDDKTSHDKVFLKTAGVMGTHDEETRKFFKHSSVMCVLSPRYASNKMSFLKQQVVGTVFTHHQKCVIVDTQAAGNNRKITAFIGGLDLCDGRYDTPEHRLFRNLDDVFDGDFHNPTFSAGTRVPRQPWHDLHCRIDGPAAYDVLINFEQRWRKATKWKEFAILFKKSSQWHDDALIRIERISWILSPSGAATLKDKSDDYTVPEDDPLVWVSSEDDPENWHVQIFRSIDSGSLKGFPKRVDVALSQNLICAKNLVIDKSIQTAYIQAIRSAQHFIYIENQYFIGSSYAWPAYKDAGADNLIPMELALKIASKIRAKERFAVYIVLPMWPEGDPKTGAMQEILFWQGQTMQMMYDAVARELKSMQLTDVHPQDYLNFYCLGNREHFNEDSSSTNGAQVSTAYKYRRFMIYVHAKGMIVDDEYVIIGSANINQRSMAGTKDTEIAMGAYQPHYTWSAKKRHPHGQIYGYRMSLWGEHLGMLDETFEEPERLECVHKVNKIADNNWKLFASEDFSLLQGHLLKYPVQVDSDGKIRSLPDCENFPDAGGKILGAHSTTIPDILTT

SEQ ID NO: 501 - protein, 847 aa, Glycine max
MPHNPDTVVYLHGTLDLVIEDARFLPNMDMLSERVRRFFSALNTCSASITGKRKQRHARHRHRKIITSDPYVTVCLAGATVARTRVISNSQNPTWDEHFKIPLAHPASQVEFYVKDNDMFGADLIGVATVSAERILSGEAIRDWFPIIGTFGKPPKPDCAVRLAMKFTRCEDSFMYRSRTETDPDRFVVRDSYFPVRHGGSVTLYQDAHVPDSMLPEVELEDGVVFEHGKCWEDICHAILGAHHLVYIVGWSIYHKVKLVREPTKALPSGGNLNLGELLKYKSQEGLRVLLLVWDDKTSHSKFGINTSGVMQTHDEETRKFFKHSSVRCLLSPRYASSKLSIFKQQVVGTLFTHHQKCVIVDTQAHGNNRKITAFIGGLDLCDGRYDTPEHRILRDIDTVYQDDYHNPTFCAGTKGPRQPWHDLHCKIEGPAAYDILTNFEQRWRKATKWSELGRKLKRVSHWNDDSLIKLERIFWILSPSESTPVDDPELWVSKEDDPENWHVQVFRSIDSGSLKGFPKDVVVAETQNLVCAKNLVIDKSIQTAYIHAIRSAQHFIYIENQYFIGSSFAWPAYKEAGADNLIPVELALKIVSKIRSKERFTVYIVIPMWPEGSPSSTSVQEILFWQGQTMKMMYEIIALELKSMQLDSHPQDYLNFYCLGNREQLTTEVSSSSNSPSDNGETVSASQKFRRFMIYVHAKGMIVDDEYVILGSANINQRSLAGSRDTEIAMGAHQPHHTWSQKKRHPHGQVYGYRMSLWAEHMETIEACFKEPESLECVKSVNKIAEDNWKKYTADDYTPLQGHIMKYPVCVNAYGKVKSLTGFESFPDVGGKVLGSRSTLPDALTT

SEQ ID NO: 502 - protein, 847 aa, Glycine max
MPHNPHTVVYLHGTLDLVIEEARFLPNMDMLSERVRRFFSALNTCSASISGKRKQQQARHRHRKIITSDPYVTVCLAGATVARTRVISNSQDPTWNEHFKIPLAHPASQVEFYVKDNDMFGADLIGVATVSAERILSGEAISDWFPIIGTFGKPPKPDCAVRLAMKFTRCEDSPMYRAGTESDPDRFVVRESYFPVRRGGSVTLYQDAHVPDSMLPEVELEDGVVFEHGKCWEDICHAILEAHHLVYIVGWSIYHKVKLVREPTKPLPSGGNLSLGELLKYKSQEGLRVLLLVWDDKTSHSKFFINTSGVMQTHDEETRKFFKHSSVRCLLSPRYASSKLSIFRQQVVGTLFTHHQKCVIVDTQAHGNNRKITAFIGGLDLCDGRYDTPEHRILRDIDTVYQDDYHNPTFCAGTKGPRQPWHDLHCKIEGPAAYDILTNFEQRWRKATRWSELGRKLKRVSHWNDDSLIKLERISWILSPSESTPIDDPELWVSKEDDPENWHVQVFRSIDSGSLKGFPKDVVVAETQNLVCAKNLVIDKSIQTAYIHAIRSAQHFIYIENQYFIGSSFAWPAYKEAGADNLIPVELALKIVSKIRSKERFAVYIVIPMWPEGSPSSTSVQEILFWQGQTMKMMYEIIARELKSMQLDSHPQDYLNFYCLGNREQLTTEVSSSSSSPSDNGETVSASQKFRRFMIYVHAKGMIVDDEYVILGSANINQRSLAGSRDTEIAMGAYQPHHTWSQKKGHPHGQVYGYRMSLWAEHTGTIEACFKEPECLECVKSVNKIAEDNWKKYTADDYSPLQGHLMKYPVSVNANGKVKSLPGFESFPDVGGKVLGSRSTLPDALTT

SEQ ID NO: 503 - protein, 857 aa, Glycine max
MDCHGGICQSSPNREHEGLNEHVFLHGDLDLLIVEAKSLPNLDLSTEAVRKCITMGNMCHPPFIKGLKTHSGKDKMITSDPYVSVCIAGATIAQTRVIANCENPLWDEQFIVPVAHPAQKLEFLVKDNDLLGAELIGVVEIPVQKIIAGNTINDWFPIIGQYGNCLKPYPELHISVQYRQIGVNRSESISSGDGKALGVPKTYFPLRKGGSVTLYQDAHLPDGMLPEIPLEGGKVFQQNKCWEDICHAILEAHHLIYIIGWSVYHPVRLVREATKPLPSGGELSLGELLKYKSQEGLRVVMLIWDDRTSHDKFLLKTDGVMQTHDEETKKFFKHSTVHCVLSPRYASNKLSIFKQQVVGTLFTHHQKCVLVDSLGSGNNRKITAFMGGLDLCDGRYDTPEHRLFRDLDTVFHNDFHNPTFQLNSNSCAPRQPWHDLHCKIEGPAAYDILTNFEQRWRKAKKWRDFRLKKVTNWHDDALLRLDRISWIVKPSPCSKGDKSVHVTDEKDPESWNVQIFRSIDSGSVKGFPKDVDKAKSQNLLCGKNLKVDQSIHTAYVRAIRSAERFVYIENQYFLGSSYHWPSYKNNAGANHLVPMELALKIAGKIGANERFCVYIVIPMWPEGVPTSAAVQEILFWQGQTMSMMYKIIADALEKAGLSDKYHPQDYLNFYCLGKREPQSTNISPTPNPSENRALVSVKKFRRFMIYVHAKGMVIDDEYVIIGSANINQRSLDGSRDTEIAMGAYQPNYTWTEKNAHPRGQVYGYRMSLWAEHLADLDHCFTEPHNLECVRHVNKIAKQNWDIYVSEEGNRMRGHLMQYPVKISKDGKVSALDDYESFPDVGGKVLGSPNSLPDALTA

SEQ ID NO: 504 - protein, 857 aa, Glycine max
MDCHGGISQSSPNREYEGLNGPVFLHGDLDLLIIEAKSLPNLDLSSETIRKCITMGNMCHPPFIKGLKTHSGKDKMITSDPYVSVCIAGATIAQTRVIANCENPLWDEQFIVPVAHPAQKLEFLVKDNDILGAELIGVVEIPVQKIIAGNTVNDWFPIIGQYGNCLKPYPELHISVQYRQIGVNRSESISSGDGKALGVPKTYFPLRKGGSVTLYQDAHLPDGMLPEITLEGGKVFQHNKCWEDICHAILEAHHLIYIIGWSVYHPVRLVREATKPLPSGGELSLGELLKYKSQEGLRVVMLIWDDRTSHDKFLLKTDGVMQTHDEETKKFFKHSTVHCVLSPRYASNKLSIFKQQVVGTLFTHHQKCVLVDSLGSGNNRKITAFIGGLDLCDGRYDTPEHRLFRDLDTVFHNDFHNPTFQLHSNSCAPRQPWHDLHCKIEGPAAYDILTNFEQRWRKAKKWRDFRLKKVTNWHDDALLRLDRISWIVKPSPSSNGDKSVHVTDENDPESWNVQIFRSIDSGSVKGFPKDVDKAKAQNLFCGKNLKVDQSIHTAYVRAIRSAEHFVYIENQYFLGSSYHWPSYKNNAGANHLVPMELALKIAGKIGANERFCVYIVIPMWPEGVPTSAAVQEILFWQGQTMSMMYKIVADALEKAGLSYQYHPQDYLNFYCLGKREPQSTNISPTPNPSENRALVSVKKFRRFMIYVHAKGMVVDDEYVIIGSANINQRSLDGSRDTEIAMGAYQPKYTWTEKNAHPRGQVYGYRMSLWAEHLGSLDHCFAEPHNLECVRHVNKIAKRNWDIYVSEEENRMRGHLMQYPVKISRDGKVSALDDYESFPDVGGKILGSPNSLPDALTT

SEQ ID NO: 505 - protein, 759 aa, Glycine max
MEEKPKLLIHGTIEATIFNATPYSPSFPFNCVCTNGKPAYVTINIDNNRVAKTTQEHERVWNQTFQIQCAHPEDSTTTITLKTSCSVLGKFHVQAKRLKEESLINGFFPLLMENGKPNPQLKLRFMLWFKPADMEPSWTKILSNGEFQGLRDATFPQRSNCQVKLYHDAHHSSTFQPPFDLCGAPRKLWEDVYKAIEGANYLIYIAGWSFNPKMVLVRDPQTEIPHAREIKLGELLKKKAEEGVAVRVMIWDDETSLPFIKNKGVMKTHDEDAFAYFKHTKVICRKCPRLHHEFPTLFAHHQKTITVDTRAPNSVRAREIMSFLGGVDLCDGRYDTEKHSLFQTLTEESHYHDFYQTNIAGASLNKGGPREPWHDAHASVTGDAAWDVLTNFEQRWTKQCDASLLVPANTLENLIPTCSSPPKERNWKVQVYRSIDHVSASQLFRKLTVERSIHEAYVEAIRRADRFVYIENQYFIGGCHLWQKDRHSGCRNLIPVEIALKVVSKIKARERFAVYIVIPMWPEGVPESEPVQDILHWTRETMIMMYKLIGEAIIESGEPGHPRDYLNFFCLANREKKGKEEYLSPHSPHPETQYWNAQKNRRFPVYVHSKIMIVDDIYILIGSANVNQRSMDGQRDTEIAIGAYQSQDGADHHIISRGDIHAYRMSLWYEHTGITEELFLEPESLSCVKRMLSIGDHMWGVYSSEETVDMEGVHLVSYPVKVTQEGSVKDTVDGGDHFPDTKSPVKGKRSKFLAPIFTT

SEQ ID NO: 506 - protein, 769 aa, Glycine max
MKILTVRSMEETPKLLHGTIEATIFNASPYSPLFPFNCICANGNPAYVTIKIDSQKLAKTSQESNRVWNQTFQIQCAHPADSCITITLKTSSSSILGKFHIQAQQLLKKGGLINGFFPLLMDNGKPNPKLKLKFQLWFKPAELEPSWAKMLSNDWEFQGLREATFPLRSNCQVKLYHDAHHSSAFQPPFDLCGAPKKLWEDVYKAIEGAKYLVYIAGWSFNPMMVLVRDPLTEIPRARGIKLGELLKKKAEEGVAVRVMLWDDETSLPFVMNKGELNNQDEEAFAYFNHTKVICRKCPRSHHMFPTLFAHHQKTITVDTKAPKSVGDRELMSFLGGLDLCDGRYDSEQHSLFQTLIRESHCYDFYQTSIEGASLNKGGPRKPWHDAHACVTGEAAWDVLTNFEQRWTKQCDPSFLVPSSTLANLMPRTSSSTPTERNWKVQVYRSIDHVSVGELSTKLNVERSIHEAYVEAIRRAERFIYIENQCFIGGCHWWKKDRHSGCTNLIPIEIALKVVSKIKAKERFSVYIVIPMWPEGEPESEPVQDILHWTRETMAMMYRLIGDAIQESGEPAHPRDYLNFFCLANREQKGQGEYLPLDSPQPETQYWNAQKNRRFMVYVHSNFMIVDDLYILIGSANVNQRSMDGQRDTEIAIGCYQSQDGDDNNQMNLDDIQAYRMSLWYEHTVSVDELFLEPERLECVERMRSIGDEMWEIYSSEEIVDMEGVHLVTYPVRVTQEGYVKDLTDGVHFPDTNSLVKGKRSKILPPIFTT

SEQ ID NO: 507 - protein, 776 aa, Glycine max
MNILTVRAIEETPKLLHGTIEATIFNATPYSPLFPFNRFSCFQCICANGNPAYVTIKIDSQKFAKTSQESNRVWNQTFQIQCAHPADSCITITLKTSRSSVLGKFHIQAQQLLKKGGLINGFFPLLMDNGKPNPKLKLKFQLWFKPAELEPSWAKMLSNDWEFQGLREATFPLRSNCHVKLYHDAHHSSAFQPPFDLCGAPKKLWEDVYKAIEGAKYLVYIAGWSFNPMMVLVRDPHTEIPHARGIKLGELLKKKAEEGVAVRVMLWDDETSLPFVKNKGELNNQDEEAFAYFNHTKVICRKCPRLHHMFPTLFAHHQKTITVDTKAPKSVGDRELMSFLGGLDLCDGRYDTEQHSLFQTLIRESHCYDFYQTSIEGASLNKGGPREPWHDAHACVTGEAAWDVLTNFEQRWTKQCDPSFLVPSSTLANLMPRTSSSTLMERNWKVQVYRSIDHVSVSELSTKLNVERSIHEAYVEAIRRAERFIYIENQYFIGGCHWWKKDRHSGCTNLIPIEIALKVVSKIKAKERFAVYIVIPMWPEGEPESEPVQDILHWTRETMTMMYRLIGEAIQESGEPAHPRDYLNFFCLANREQKGQGEYLPLDSPQPETQYWNAQKNRRFMVYVHSNFMIVDDLYILIGSANVNQRSMDGKRDTEIAIGCYQSQDGDDDTNQVNLDDIQAYRMSLWYEHTVSVDELFLEPQRLECVERMRSIGDEMWEIYSSEEIVDMEGVHLVTYPVRVTQEGYVKNLTDGVHFPDTNSLVKGKRSKILPPIFTT

SEQ ID NO: 508 - protein, 1120 aa, Glycine max
MYGKETDLGPFCRRFEEGAEQFRLDVAQNPNDTKEFIWCFLCEAQLFGVDEARKRYLEVGRDPWPVMREAYNMFIDGGDPEKLVAAFSGSREGEYFYASLYAGLYYESEFKWRLVKKASQLLYLQFCLRKRALIEDFHDKQEQLKEWLHNLGIVDQTVMVQDDEEPDDGAVPLHHEDSVKNRYVPSVAALSIIRPSIGGQQTIADRAKVAMQGYLNRFLGNLDIVNSQEVCRFLEVSRLSFLQEYGPKLKEGYVMVKHLSNISQDSDVSCFPCNWFHCCNNSWKKVWSVLKPGFLAFLDDPFNNKPLDIMIFDILPYSNGDGGTKIFLADPVKERNPLRYTFKVTSGNRSILLRTTSSAKVKAWVTAINEASLRPLEGWCCPHRFGSFAPIRGLTEDGSQAQWFVDGQAAFEAIATSIQDAKSEIFITGWWLCPELYLRRPFDSFSTSRLDSLLEEKANQGVQIYVLLYKEVSLALKINSLYSMRRLFKIHENVRVLRYPDHFAARVYLWSHHEKLVIIDYKICYIGGLDLCFGRYDTPEHKVGDCPSVIWPGKDYYNPRESEPNSWEDTMKDELDRKKYPRMPWHDVHCALWGPPCRDIARHFVQRWNHAKRTKAPNEHGIPLLMPHHHMVLPHYMGRSKEIDIDEKKDKDKRKGIGRQDSFSSESPMQDIPLLLPQEADGLDTSNGDHTNLSENFPLSQKLEHETLVSDTQMKGFQDEVVPLNLGAQPVANALDDWWETPEETNDDITLEYGEVGPRTTCHCQVIRSVSQWSAGTSQPEESIHTAYCSLIEKAKHFIYIENQFFISGLAGDDIILNRVLEALYRRILQAHKDQKDFRVIIVMPLLPGFQGGLDDGGAATVRALTHWQYRTISRENHSILDNLEAILGPKTQDYISFYGLRSHGRLYENGPVATSQVYVHSKLMIIDDRIAFIGSSNINDRSLLGLRDSEIGVLIEDKEYVDSLMNGKPWKAGKFSYSLRCSLWSEHLGLHAGEISKISDPVADTTYKDLWSATAKENTRIYHEVFACIPNNQIHSRAALRQSMVHWKEKLGHTTIDMGIAPDKLVCHENGEIKIIDPIDRLKSVKGHLVSFPLEFMREEDLRPAVIESEFYVAPQVYH

SEQ ID NO: 509 - protein, 1123 aa, Glycine max
MATEQLMSGGGSRYVQMKSSPPSSPPAAAAEEMSSVPSFRHSGAEANRIFEELPKASIVSVSRPDASDISPMQLSYTIQVQYKQFKWELTKKAHQVFILHFSLKKRAFIEEIHEKQEQVKEWLQNLGIGEHTAMVQDDDEGDDETVPLHTEETHESAKDRDVPSSAALPIIRPALGRQHSIADRAKRAMQGYLNHFLGNISIVNSHEVCKFLEVSKLSFSPEYGPKLKEEYVMVKHLPKIQKDDDSRKCCLSDCFSCCNDNWQKVWAVLKPGFLALLADPFDTQPLDIIVFDVLPASDGNGDGRLSLASEMKERNPLRHSFKVTCGIRSIRIRVKSSSKVKDWVAAINDAGLRPPEGWCHPHRYGSFAPPRGLVEDGSQAQWFIDGRAAFEAIASSIEAAKSEIFICGWWLCPELYLRRPFHTHASSRLDNLLEAKAKQGVQIYILLYKEVALALKINSVYSKKKLLSIHENVRVLRYPDHFSTGVYLWSHHEKLVIIDNHICFIGGLDLCFGRYDTSEHKVGDFPPLIWPGKDYYNPRESEPNSWEDTMKDELEREKYPRMPWHDVHCALWGPPCRDIARHFVQRWNYAKRNKAPYEQAIPLLMPQHHMVIPHYLGRSREIQIASRNIDNHRVLKREDSFSSSSQDQDIPLLLPQESDGLDTHEGDQKLNGVISFSHQLDKPRRISSGLPFSFRKAKIVAVGPDTPMKGFVDDLDSEHDREKMSLDRVAHIDLQSTNPEWWETQERGDQGGFAEESGQVGPLASCRCQVIRSVSQWSAGTSQTEESIHNAYCSLIEKAEYFIYIENQFFISGLSGDEMIRNRVLEALYRRIMRAYNDKKSFRVIVVIPLLPGFQGGLDDSGAASVRAIMHWQYRTICRGQNSILHNLYELLGSKIHDYISFYGLRSYGRLSNGGPVATSQVYVHSKIMIVDDCITLIGSANINDRSLLGSRDSEIGIVLEDREFIGSYMDGKPWKAGKFSLTLRLSLWSEHLGLPIGEVNQIMDPVVESTYRDIWMATAKTNTTIYQDVFSCVPNDLIHTRFSFRQSVAFWKERIGHTTIDLGIAPEKLESYHDGGIKNTDPLERLASLKGHLVSFPLEFMCQESLRPAFNESEYYATQVFH

SEQ ID NO: 510 - protein, 1126 aa, Glycine max
MATEQLMSSAGGGSSRYVQMKSSPPPSPPAAAAEEISSVPSFRHSGAEANRIFEELPKAAIVSVSRPDASDISPMQLSYTIQVQYKQFKWELTKKAHQVFILHFALKKRAFIEEIHEKQEQVKEWLQNLGIGEHTAMAQDDDEGDDETVPLHTEETHESAKDRDVPSSAALPIIRPALGRQHSIADRAKRAMQGYLNHFLGNISIVNSREVCKFLEVSKLSFSPEYGPKLKEEYVMVKHLPKIQKDDDSRKCCLSDCFSCCNDNWQKVWAVLKPGFLALLADPFDTQPLDIIVFDVLPASDGNGDGRLSLASEMKERNPLRHSFKVTCGIRSIRIRVKSSSKVKDWVAAINDAGLRPPEGWCHPHRYGSFAPPRGLVEDGSQAQWFIDGRAAFEAIAFSIEAAKSEIFICGWWLCPELYLRRPFHTHASSRLDNLLEAKAKQGVQIYILLYKEVALALKINSVYSKKKLLSIHENVRVLRYPDHFSTGVYLWSHHEKLVIIDNHICFIGGLDLCFGRYDTSEHKVGDFPPLTWPGKDYYNPRESEPNSWEDTMKDELEREKYPRMPWHDVHCALWGPPCRDIARHFVQRWNYAKRNKAPYEQAIPLLMPQHHMVIPHYLGRSREIQIESRNTDNHRVLKREDSFSSSSQDQDIPLLLPQEPDGLDTHEGDQKLNGVISFSHHLDKPRRISSGLPFSFRKAKIVAVGPDTPMKGFVDDLDSEHGLEKMSLDRVAHFDLQSTKPQWWETQERGDQGGFAEESGQVGPLASCRCQVIRSVSQWSAGTSQTEESIHNAYCSLIEKAEYFIYIENQFFISGLSGDEMIRNRVLEALYRRIMRAYNDKKSFRVIVVIPLLPGFQGGLDDSGAASVRAIMHWQYRTICRGQNSIMHNLYELLGSKIHDYISFYGLRSYGRLSNGGPVATSQVYVHSKIMIVDDCITLIGSANINDRSLLGSRDSEIGIVLEDREFIGSYMDGKPWKAGKFSLTLRLSLWSEHLGLPIGEVNQIMDPVVESTYRDIWMATAKTNTTIYQDVFSCVPNDLIHTRLAFRQSVAFWKERIGHTTIDLGIAPEKLESYYDGGITNTDPLERLASVKGHLVSFPLEFMCQESLRPAFNESEYYATQVFH

SEQ ID NO: 511 - protein, 984 aa, Glycine max
MASTVSSILRASRSKLSSSSSASLSRTLARSAPRRSPGSSSAATRSFGSAVPRWSHGVDWRSPLGLRPQIRAAAPLIERFHRRIATSATDNPFKGNLTSLPKPGGGEFGKFYSLPSLNDPRIDRLPYSIRILLESAIRNCDNFQVKKEDVEKIIDWENSSVKQVEIPFKPARVLLQDFTGVPAVVDLACMRDAMNKLGSDSNKINPLVPVDLVIDHSVQVDVARSENAVQANMELEFQRNKERFAFLKWGSNAFRNMLVVPPGSGIVHQVNLEYLGRVVFNTEGLLYPDSVVGTDSHTTMIDGLGVAGWGVGGIEAEAAMLGQPMSMVLPGVVGFKLSGKLRNGVTATDLVLTVTQILRKHGVVGKFVEFYGDGMGELSLADRATIANMSPEYGATMGFFPVDHVTLQYLKLTGRSDETVAMIEAYLRANKLFIDYNEPQPDRVYSSYLELNLDEVEPCISGPKRPHDRVPLKEMKADWHACLDNNVGFKGFAIPKDVQGKVAKFDFHGQPAELKHGSVVIAAITSCTNTSNPSVMLGAGLVAKKAHELGLQVKPWVKTSLAPGSGVVTKYLLKSGLQKYLNEQGFNIVGFGCTTCIGNSGELDQSVASAISENDIVAAAVLSGNRNFEGRVHPLTRANYLASPPLVVAYALAGTVDIDFEKEPIGTGKDGNNVYLRDIWPSTQEIAEAVQSSVLPDMFRSTYEAITKGNTMWNQLQVPAETLYSWDPKSTYIHEPPYFKGMTMDPPGAHGVKDAYCLLNFGDSITTDHISPAGNINKDSPAAKYLLDRGVEQKDFNSYGSRRGNDEVMARGTFANIRLVNKLLNGEVGPKTVHIPTGEKLYVFDAAQRYKAEGQDTIVLAGAEYGSGSSRDWAAKGPMLLGVKAVIAKSFERIHRSNLVGMGIVPLCFKSGEDADTLGLTGHERYTIDLPSNISEIRPGQDVTVTTNTGKSFTCTVRFDTEVELAYFNNGGILPYVIRNLIKQ

SEQ ID NO: 512 - protein, 369 aa, Glycine max
MAAKKACETFSKSLIEEVNRWGCLKQTGVSLRYMMEFGSKPTNKNLLISAQFLHKELAIRIARRAVELENLPYGLSQKPAVLKVRDWYVDSFRDVRAFPDIKNVNDEREFTEMIKAIKVRHNNVVPTMAMGVQQLKKGMDPKIVYEDLVEIHQFLDRFYMSRIGIRMLIGQHVELHNPNPPPHVVGYIHTKMSPVEVARNASEDARSICCREYGSAPDVHIYGDPNFTFPYVPAHLHLMVFELVKNSLRAVQERFMNSDKVAPPIRIIVADGIEDVTIKVSDEGGGIARSGLPKIFTYLYSTARNPLDEHSDLGIGDNVTMAGYGYGLPISRLYARYFGGDLQIISMEGYGTDAYLHLSRLGDSQEPLP

SEQ ID NO: 513 - protein, 109 aa, Brassica napus
MNGASPAHSSVSTTAVAGGGGSSGAAAGLDDFPFPPDIPSMQDRKDEAMRVLKTDLMGELDKEVKSLEEDSWMFQGPRSRIHLISRREGNFLKRDCEAVVKSSTVQLPR

SEQ ID NO: 514 - protein, 275 aa, Brassica napus
MFTTFMVPLSCSWREVLSHANLSFPTMRNEDNYLDLNNLPDDSYRDGNKQTLEEGSSSGQRKKKGSKEGKDESGKVYECRFCSLKFCKSQALGGHMNRHRQGMETETLNQARQLVYRNDTLTPPGITPFGYQTADPTIYRSVYSSPMLYTGSSSTNLVPQPLQPPYQYSSNQYSPYNNMNDYYFSQSFRGNRSISPNPNLPTTTTVNYMAGGPVESSYTCVGEPIDQTGFSNRGSAIVRAPPLEPPQVRDGDASRQRLDHSLRLPMNRFQDHHSL

SEQ ID NO: 515 - protein, 300 aa, Brassica napus
MQNQNDTVKDDAELAASISAEQWGCCSVEEPSFQDDEAAKVPYVGDKEPMSSLSSEYQAGSPILLEKIKVLDSQYVAIRRTRGDGNCFFRSFMFSYLEHILESQDGAEVDRIKVNVEKCRKNLQNLGYTDFTFEDFFALFLEQLDDILQGGEESISYDELVNRSRDQSVSDYIVMFFRFVTAGEIKTRAEFFEPFITGLSNTTVDQFCKTSVEPMGEESDHIHITALSDALGVAIRVVYLDRSSCDTGGGVTVNHHDFVPVGSGTNEKEEASSAAPFITLLYRPGHYDILYPKVLENVEK

SEQ ID NO: 516 - protein, 111 aa, Glycine max
MNSSSPAHSSLSTTAVVGGGGGGGGSSNATVSIDDFHLPCDPISSQERKDEAMIVLKSDLMAALDKEVKSLVEDNWKFEGPRSRIHLVSHRGGHLYRPTEISKNWNLTPPK

SEQ ID NO: 517 - protein, 256 aa, Glycine max
MRPERNPLDLNNLPDEYSRDGKQVLEDHTSSSGCRKKKSGGKDGKDECGKVYECRFCSLKFCKSQALGGHMNRHRQERETETLNQARQLVFRCDHNIAAQGAPHLGCCQTIGTGGYHPSGDPTVPLRFPRYFSGSSSTHMPPSPPPPPPPQRPYLYPSPTRPVSFGSSHFPLQHAVNDYYVGHVMSGGSHGHYVGGESTRSYTCIGAPVGQGGGFAGGKEGSAVQEEGLSTWGRGYSGAQDRLDPPSAINRFQDGF

SEQ ID NO: 518 - protein, 247 aa, Glycine max
MGSLSLFTGNKVEHCPWFVTHPCGCRKKKSGGKDGKDECGKVYECRFCSLKFCKSQALGGHMNRHRQERETETLNQARQLVFRCDHNIAAQGAPHLGCCQTIGTGGYHPSGDPTVPLRFPRYFSGSSSTHMPPSPPPPPPPQRPYLYPSPTRPVSFGSSHFPLQHAVNDYYVGHVMSGGSHGHYVGGESTRSYTCIGAPVGQGGGFAGGKEGSAVQEEGLSTWGRGYSGAQDRLDPPSAINRFQDGF

SEQ ID NO: 519 - protein, 257 aa, Glycine max
MRPERNPLDLNNLPDEYSRDGKQVLEDHTSSPGCRKKKSGGKDGKDECGKVYECRFCSLKFCKSQALGGHMNRHRQERETETLNQARQLVFRSDHIIAPQGAPHLGCCQPIGTGGYHPSGDPTVPLRFPRYFSGSSSTHMPPPPPPPPPPQQSHLYASPSRPVSFGSSHFPHQHAVNDYYVGHVMSGGSHGHYVGGESTSSYTYIGAPVGQAGGFAGGGKEGSAVQEEGLSWGRSYSGGAQHRLDPPSAINRFHDGF

SEQ ID NO: 520 - protein, 320 aa, Glycine max
MASNLAFSIAIAVVWLSSILVFTQAQFQFQPQPIMTPLAVFEPSSVSDISSLIKFSNSLATPFTIARDAVVLNITNLNDFRNGLGILVADCDHDGKRKGDLVTCSKEKNSDTFYAVLGGLGQFGVITRARIPLGAAPTRAIFYVGYLQVKWLHLLYNNFTAFSGDQEHLISFSERNEIIAADYVEGMLLLNQPPLDLSFYAASDQQRITTLVTQYGIVYILELVKYYDNNSQAHINEDLVNLVKGLNFVPTFMLEKDASYEEFLNRVHVAELVLRPKGLSKIPHPWLNIWVPRSRISYFNDGVFKDIILKQNIAVGISLV

SEQ ID NO: 521 - protein, 301 aa, Glycine max
MQSKEAVVEDGEIKSVTAVGSEIDGWTNFGDDDIMQQQYTIQSEEAKKVPFVGDKEPLSSLAAEYKSGSPILLEKIKVLDEQYAAIRRTRGDGNCFFRSFMFSYLEHVMKCQDQAEVDRIQANVEKSRKALQTLGYADLTFEDFFALFLEQLESVIQGKETSISHEELVLRSRDQSVSDYVVMFFRFVTSAAIQKRTEFFEPFILGLTNTTVEQFCKSSVEPMGEESDHVHITALSDALGIPVRVVYLDRSSSDTGGVSVNHHDFMPVAGDLPNASCSSEKNIPFITLLYRPGHYDILYPK

SEQ ID NO: 522 - protein, 336 aa, Brassica napus
MIFCLFTNNSNIIITSGLFIYISGKGETLACSPQLNPELFYGVLGGLGQFGIISRARIVLNHAPKRAKWFKMLYSDFTAFTKDQESLISMDNDTGIDYVEGQLLMSNGIVDTSFFPPSDQSKVADLVKNHSIIYVLEVAKYYDDPTVPTTGQVIDKLTKTLSYLPGFISMHDVLYFDFLNRVQVEEDKLRSLALWEVPHPWLNLYVPKTQILDFHNGVVKDILLKQNSTSGVALFYPTNRNKWDNGMSAMIPDEDVFYVVGLLQAASSQNVQEVESVNEAIIRFCKDSGIKIKQYLMHFTRKEDWVEHFGSKWGAFSKRKDLFDPKKLLSPGQDIF

SEQ ID NO: 523 - protein, 768 aa, Brassica napus
MGRGIGTQGVEGLSQTSYVPGFDPSQDKKEEDWWTPMTSVRGSVDNPVKKEKTEMNTAPPPSQWEKWCKRKGHGLQLSDSPLPEDASPQASLYYISEEVVSAGKWLGNEEMDAVMFIWRVNTTLNRWAPRRVAFMSAMFCLQVDAAYKKFLPNKKAYQLPDFLLGYGRGELPSHGRTDLYTFLRLQIFVDTNAGNHWVGVCVNIIERKVEVFDCGRGKNRQYVEKFAAIIPRIVKSVAPQERQKQLLLSSYSIVDVPMKVELVNLIVYWMLLMKDKTHLFKWTDKSVVEEIEDFQDLFDVLLVDNSEFQKSVRAGEAMMTRHESRIQEMEDAMCHYEEKTSECIRELRGIKALFVCCLVMCTNGETMCRVAARGQGHSLNGQASVSEDKEYADVAGGTLWVDVLRETAEQGVSPVSWTDYLHISVGGTLSNAGIGGQMFRNGPQISNVLELDVITGKGETLACSPQLNPELFYGVLGGLGQFGIITRARIVLNHAPRRAKWFKMLYSDFTAFTKDQESLISMNNDTGVDYVEGQLLMSNGIVDTSFFPPSDQSKVADLVKNHSIIYVLEVAKYYDDPTVPTTGLVIDKLTKTLSYLPGFISMHDVPYFDFLNRVQVEEDKLRSLALWEVPHPWLNLYVPKTQILDFHNGVVKDILLKQNSTSGVALFYPTNRNKWDNRMSAMIPDENVFYVVGLLQSASSQNVQEVESVNEAIIRFCKDSDIKIKQYLMHFTRKEDWVGHFGSKWGAFSKRKDLFDPKKLLSPGQDIF

SEQ ID NO: 524 - protein, 484 aa, Brassica napus
MANIPLMITLTTVLIYLLPSCIKSSEIILPKSLNLTLLTDPSAISVASHDFGNITTVIPGGVICPSSPAEISRLLSYASNGERKFQVAARGQGHSLMGQAGVPDGYADVAGGTLWVDVLKKTAEKGVSPVSWTDYLHVSVGGTLSNAGIGGEVFRNGPQISNVLELDVITGKGEMLACSPQLNSELFYGVLGGLGQFGIITRARIVLNHAPKRAKWFRMLYSDFTAFTKDQERLISMANDTGVDYLEGQLFMSNGVVDTSFFPQSDQSKIADLVKSHGIIYVLEVAKFYDDPTLPIIGQVVDMLTKTLSYLPGFISMHDVAYFDFLNRVKAEEDKLRSLGLWEVPHPWLNLYVPKSQILDFHNGVVKDILLKQNSTSGLTLLYPSNRNKWDNRMSAMVTDEEDVVYIIGILQSATPQNVPEVESLNDSIIRVCKDSGIKIKQYLMHYTRKEDWVEHFGTKWSAFSKRKDLFDPKKLLSPGQDIF

SEQ ID NO: 525 - protein, 516 aa, Brassica napus
MTTNPSLSIIALMTLLMCLTPTLIKSQEGIDVLLPITLNLTVLTDPFSISAASRDFGNITDVNPGAVLCPSTPAEVAHFSYDSESTTSSPGFKVAARGQGHSLRGQASAPGGVVVNMTCLAKTATPAAVVVSADGTYADVAAGAMWVEVLEAALARGVSPVTFTDYLYLSVGGTLSNAGIGGQVFRHGPQISNVHELDVITGKGDMVTCSPKLNPELFYGVLGGLGQFGIITRARIALDHAPTRVKWLRILYSDFSAFTRDQERLISMANDLRVDFLEGQLMMSNGIVDTSFFPLSDQTRVASLVNEHRIIYVLEVAKYYDTTTLPIIDQVIDTLTRTLGFTSEFMFMQDVPYFDFLNRVRNEEDKLRSIGLWEVPHPWLNMFVPKSRVLDFHEGVIKGLLLNQTATSGVTLFYPTNRNKWNNLMSAMIPNEDVFYVVGFLQSAGGSHNFEELESLNDRIINFCNNSGIKIKEYLMHYTKKEDWIKHFGPKWSDFSRRKMMFDPEKLLSPGQDIFN

SEQ ID NO: 526 - protein, 516 aa, Brassica napus
MTTNPSLSIITLMTLLMCLTPTLIKSEESIDVLLPISLNLTVLTDPFSISAASRDFGNITDVNPGAVLCPSTPAEVAHFSYDSESTTSSPGFKVAARGQGHSLRGQASAPGGVVVNMTCLAKTAKPAAVVVLADGTYADVAAGAMWVEVLEAALARGVSPVTFTDYLYLSVGGTLSNAGIGGQVFRHGPQISNVHELDVITGKGDMVTCSPKLNPELFYGVLGGLGQFGIITRARIALEHAPTRAKWIRILYSDFSAFTRDQERLISMANDLRVDFLEGQLMMSNGIVDTSFFPLSDQTRVVSLVNDHRIIYVLEVAKYYDTTTLPIIEQVIDRLTRTLGITSEFMFVQDVPYFDFLNRVRNEEDKLRSIGLWEVPHPWLNMFVPRSRILDFHEGVIKGLLLNQTATSGVTLFYPTNRKKWNNLMSAMIPNEDVFYVIGFLQSAGGSHNFEELENLNDRIINFCDNSGIKIKEYLMHYTRKEDWIKHFGPKWNDFSRRKMMFDPEKLLSPGQDIFS

SEQ ID NO: 527 - protein, 449 aa, Brassica napus
MMGPHSQLTVAARGRGHSLQGQAQTRHGIVIHMESLQPQKLKVHGVGGGTTPFVDVSGGELWINILHETLKYGLAPKSWTDYLHLTVGGTLSNAGISGQAFRHGPQISNVHQLEVVAGKGEILNCSERQNSDLFHGVLGGLGQFGIITRARIALEPAPTMVKWMRVLYLDFAAFARDQERLISSDDDKFDYIEGFVIINRTGLLDSWRLSFTPEDPIEASKFKSDGRNLYCLEVAKYFKLDQDKKDVMNQEVKESLSELNYISSTLFSSEVTYQEFLDRVHVSEMKLRSKGQWEVPHPWLNLLVPRSRVNEFAKGVFGNILTDTSNGPVIVYPVNKSKWDNRSSAVTPEEEEIFYLVAILTSAVPGSTGKDGVDQIVKRNQRILEFSEAAGLGLKQYLPHYTTRHEWRSHFGPKWDDFVRRKSRYDPFAMLAPGQRIFEKSPVVSPHSS

SEQ ID NO: 528 - protein, 533 aa, Brassica napus
MKYLHACFLRKRNMIIVRSFTILLLLSCIAFKLACCFSSSISSLKALPLVGHLEFEHVHPASKDFGNRYQLLPLAVLHPKSVSDIASVIRHIWMMGPHSQLTVAARGRGHSLQGQAQTRHGIVIHMESLQPQKLQVHGVGGGPTPFVDVSGGELWINILHETLKYGLAPKSWTDYLHLTVGGTLSNAGISGQAFRQGPQISNVHQLEVVAGKGEILNCSERQNSDLFHGVLGGLGQFGIITRARIALEPAPTMVKWMRVLYLDFAAFARDQERLISSDDDKFDYIEGFVIINRTGLLDSWRLSFTPEDPVEASQFKSDGRNLYCLEVAKYFKLDEDRKDVMNQEVKESLSELSYISSTLFSSEVTYQEFLDRVHVSEMKLRSKGQWEVPHPWLNLLVPRSRVNEFAKGVFGNILTDTSNGPVIVYPVNKSKWDNRSSAVTPEEEEIFYLVAILTSAVPGSTGKDGVDQIVKRNQRILEFSEAAGLGLKQYLPHYTTRHEWRSHFGPKWDDFVRRKSRYDPFAMLAPGQRIFEK

SEQ ID NO: 529 - protein, 507 aa, Brassica napus
MGWFNKIFKGSTQRFRLGNDHDHNGYYQSYPHDEPSADTDPDPDPDPDETHTQEPSTSEEDTSGQENEDIDRAIALSLIENSQGQTNNTCAGKYAMVDEDEQLARAIQESMVVGNTPRQKHGSGNVYANGDIYYPRPTAFPMDFRICAGCNMEIGHGRYLNCLNALWHPECFRCYGCRHPISEYEFSTSGNYPFHKACYRERYHPKCDVCSLFIPTNHAGLIEYRAHPFWVQKYCPSHEHDATPRCCSCERMEPRNTGYVELNDGRKLCLECLDSAVMDTFQCQPLYLQIQEFYEGLFMKVEQDVPLLLVERQALNEAREGEKNGHYHMPETRGLCLSEEQTVSTVRKRSKHGTGNWAGNMITEPYKLTRQCEVTAILILFGLPRLLTGSILAHEMMHAWMRLKGFRTLSQDVEEGICQVMAHKWLEAELAAGSRNSNVASSSSSRGVKKGPRSQYERKLGEFFKHQIESDASPVYGDGFRAGRLAVNKYGLPKTLEHIQMTGRFPV

SEQ ID NO: 530 - protein, 407 aa, Brassica napus
MGNKLVGRKRQVVEERYTKPQGLYVNTDVDIKKLRKLIVESKLAPCYPGDDESCHELEECPICFLYYPSLNRSRCCMKSICTECFLQMKNPNSARPTQCPFCKTPNYAVEYRGVKTKEEKGMEQVEEQRVIEAKIRMRQKEMEDDEEKMQKRMESSCSSSTSAVTGEMEYGSAASAISYNDPMEDAETSSSQNVSVARQRSRRPRGNRDDEVEADLEELMVMEAIWLSMQETGTQRDSGGGEVTPFRQYVSEEDHSYAEPATPSSSSGGLPCAISALAEQRQQMVGESSNHNHNHNVNVSSYSMLPGNCDSYYDIEQETDDIDHHHHHHHHQQHNYYHGNTEMGETGSSSSYMNGSESFHNFPLPPPPPLVIAPESFEEQMMMAMAVSLAEVHATTTTSAPTEVTWQ

SEQ ID NO: 531 - protein, 432 aa, Brassica napus
MWDLNDSPHQTVRQEESEEFCYSSPGKRVGSFSNSSSSAVVIEDGSDDDEPNRVRPNNPLITHQFFPEMESSVGDNGGGGTGPGFPRSHWFGVQFSQSDLATGSSVGKPATVGAVVEPTQPLKKSRRGPRSRSSQYRGVTFYRRTGRWESHIWDCGKQVYLGGFDTAHAAARAYDRAAIKFRGVEADINFNIEDYDNDMKQMTNLTKEEFVHVLRRQSTGFPRGSSKYRGVTLHKCGRWEARMGQFLGKKYVYLGLFDTEVEAARAYDKAAIKCNGKDAVTNFDSSIYDEELNAESSGNPIQQDHNLDLSLGNSVNSKHKGQDMRLKMNQQDSLHSNEILGLGQTGMVNYIPNSVHQFPGSSNIHRGGGFSLFPVTENHQFEGRTTANQVLANAAASSGFSPHNHNQIFNSTPTSHQNWLQTNGFQPPLMRP

SEQ ID NO: 532 - protein, 536 aa, Brassica napus
MGSTFLRIFMILVLSCIPGRTNLCSNPSVSTPKDLPPSVIRSSLDSLDLEGYITFHDVHNASKDFGNRYHLPPLAILHPRSASDISTVMRHIVRSTSNLTVAARGHGHSLQGQALAHQGVVINMESLLPSHDIKIYKGKQPYVDVSGGELWIDILRETLRYGLSPKSWTDYLHLTVGGTLSNAGISGQAFKHGPQINNVYQLEIVTGKGEVVTCSEKRNSELFQSVLGGLGQFGIITRARISLGPAPLMVKWIRTLYSDFSAFSRDQEHLISKKNAFDYVEGFVIINRTDILNNWRSSFTPNDSTEASQFKSDGKTLYCLEVVKYFNSEEAHSMNQEMEKLLSELSYIQSTLFSSEVPYIEFLDRVHIAEIKLREKGLWEVPHPWLNLLIPKSRIFEFATKVFNNIVTSNHNGPTLIYPVNQSKWNKHTSLITPNEDIFYLVAFLPSAIPKPSGESDLEYLLRQNQRVLSFCAEANLDVKQYLPHYETQKEWRSHFGNRWETFAKRKHKYDPLAVLAPGQRIFQRVSSQVSSIQLL

SEQ ID NO: 533 - protein, 533 aa, Brassica napus
MRLTSSLRFHRQNNKTFLRIFMILVLSCIPGRTNLCSNHSDTRSSLDSLDLEGYITFDDVHNASKDFGNRYQFPPLAILHPKSVSDISTVLRHILHLGSTSNITVAARGHGHSLQGQALAHQGVVINMESLPSPDIKIYKGTQPYVDVSGGELWINILRETLKHGLSPKSWTDYLHLTVGGTLSNAGISGQAFKHGPQINNVYQLEIVTGKGEAVTCSKKLNPELFHSVLGGLGQFGIITRARISLGPAPHMVKWIRVLYSDFSTFSRDQEHLISKKKGFDFVEGSVTINRTDLLNNWRSSFTPNDSTEASQFKSDGKTLYCLEVVKYFNKEEANSMNQEIDSLLSELSYIPSTLFSSVVPYIEFLDRVHLGEIKLRAKGLWEVPHPWLNLLVPKSSIFEFATEVFNNILTSNNNGPILIYPVNQSKWNKRTSLITPSEDIFYLVAFLPSAVQNDLEHLLRQNQRVLNFCAEAKMDVKQYLPHYETQREWRSHFGNKWETFAKMKHEYDPLAILAPGHRIFQKATQLYPIQLQ

SEQ ID NO: 534 - protein, 596 aa, Brassica napus
MRLTSSLRFHRQNNKTFLGIFMILVLSCIPGRTNLCSNHSDTRSSLDSLDLEGYITFDDVHNASKDFGNRYQFPPLAILHPKSVSDISTVVRHILHLGSTSNLTVAARGHGHSLQGQALAHQGVVINMESLQNPDIKIYREKQPYVDVSGGELWINILKETLKHGLSPKSWTDYLHLTVGGTLSNAGISGQAFKHGPQINNVYQLEIVTGKGEVVTCSEKLNPELFHSVLGGLGQFGIITRARISLGPAPHMVKWIRVLYSNFSTFSRDQEHLISKMKGFDYVEGFVSINRTDLLNNWRSSFSPNDSTEASQFKSDGKTLYCLEAVKYFNKEETNSMNQETEKLLSELSYIPSTLFSSVVPYIEFLDRVHHGEIKLRAKGLWEVPHPWLNLLVPKSSIIEFSTEVFNNILTSNNNGPILIYPVNQSKWNKQTSLITPSEDIFYLVAFLPSAVQNDLEHLLRQNQRVLNFCAEAKMDVKQYLPHYETQREWRSHFGNRWETFAKMKHEYDPLAILAPGHRIFQKATQLYPIQLQSEAKMDVKQYLPHYETQREWRSHFGNRWETFAKMKHEYDPLAILAPGHRIFQKATQLYPIQLQ

SEQ ID NO: 535 - protein, 546 aa, Brassica napus
MGLTSSLRFHRRNNKTFLRIFMILVLSCIPGRTNLCSNPSLNTLSSLDSLDLEGYITFHDVHNASKDFGNRYHLPPLAILHPKSVSDISTVMRHIVRSTSNLTVAARGHGHSLQGQALAHQGVVINMESLRSHDIKIYKGKQPYVDVSGGELWINILRETLKYGLSPKSWTDYLHLTVGGTLSNAGISGQAFKHGPQINNVYQLEIVTGKGEVVTCSEKRNSELFQSVLGGLGQFGIITRARISLGPAPLMVKWIRALYSDFSAFSRDQEHLISKENAFDYVEGFVIINRTDILNNWRSSFTPNDSTEANQFKSDGKTLYCLEVVKYFNSKEANSMNQETEKVLSELSYIPSTLFSSEVPYIEFLDRVHIAEIKLRAKGLWEVPHPWLNLLIPKSSISDFATKVFNSIVTSNHNGPILIYPVNQSKWNKHTSLITPNEDIFYLVAFLPSAIPKPSGANDLEYLLRQNQRVLSFCAEANLDVKQYLPLYETQKEWRSHFGNRWETFAKRKYKYDPLAILAPGQRVFQRVSSQASVPLVTASARQLRE

SEQ ID NO: 536 - protein, 545 aa, Brassica napus
MGLTSSLRRNNKSFLRIFMILVLSCIPGRTNLCSNHSVTTPIDLPPDIRSSLDSLDLEGYISFNDVHNASKDFGNRYQLPPLAILHPRSVSDISTMVRHIVHLGSTSNLTVAARGHGHSLQGQSLAHQGVVINMESLRSPDIKIHKGKQPYVDVSGGESWINILRETLKYGLSPKSWTDYLHLTVGGTLSNAGISGQAFKYGPQINNVYQLEIITGKGEVMTCSEKQNSELFYSVLGGLGQFGIITRARIALGPAPHMVKWIRVLYSDFSAFSRDQEHLITKKNGFDYVEGFVTVNRTDLLDNWRSSFSPNDSIGASQFKSEGKTLYCLEVVKYFKLEEANSTNLEVEKLLSELSYIPSTLFSSEVTYIEFLDRVHIAEIKLRAKGLWEVPHPWLNLLIPKSSIFEFATEVFNNILTSNNNGPILIYPVNQSKWNKHLSLITPDEDIFYLVAFLPSAVPNPNSGTSNLEYLLRQNQRVLNFCAAANINVKQYLPHYETQREWRSHFGNRWETFAKRKHTYDPLAILAPGHRIFQKATQLSPIQLL

SEQ ID NO: 537 - protein, 532 aa, Brassica napus
MGLTSSLRRNNKSFLRIFMILVLSCIPGRTNLCSNHSVTTPIDLPPDIRSSLDSLDLEGYISFNDVHNASKDFGNRYQLPPLAILHPRSVSDISTMVRRIVHLGSTSNLTVAARGHGHSLQGQALAHQGVVINMESLRSPDIKIHKGKQPYVDVSGGESWINILRETLKYGLSPKSWTDYLHLTVGGTLSNAGISGQAFKYGPQINNVCQLEIVTGKGEVMTCSEKQNSELFYSVLGGLGQFGIITRARIALGPAPHMVKWIRVLYSDFSAFSRDQEHLITKKNGFDYVEGFVTVNRTDLLDNWRSSFSPNDSIGASQFKSEGKTLYCLEIVKYFNTEEVNSVPQERFPLQETEKLLSELSYIPSTLFSSEVPYIEFLDRVHIAEIKLRAKGLWEVPHPWLNLLIPKSSIFEFATEVFNNILTSNNNGPILIYPVNQSKWNKHTSLITPDEDIFYLYLLRQNQRVLNFCSATNINVKQYLPHYETQREWRSHFGNRWETFAKRKHTYDPLAILAPGHRIFQKATQLSPIQLF

SEQ ID NO: 538 - protein, 517 aa, Brassica napus
MASNNFPSQSHLLVIIIFITTLLTPITTNTSPQPWNILSNDNFAGKLTSASSSVEAASIDFGHVTKILPSAVLNPSSVQDIIDLIKLSFDSQSSFPIAARGHGHSFRGQAAAKDGVVVNMRSMVNEDRGIKVSRTGLYADVDTAWLWIEVLNKTLELGLTPVSWTDYLYLTVGGTLSNGGISGQTSRYGPQISNVLELDIITGKGEIATCSNDMNSDLFYAALGGLGQFGIITRARIKLELAPKRAKWLRFLYTDFSEFTRDQERLISEAGGLHFLEGSVMLDHGPPDNWRSTYYPPSDHLRIVSMIKRHRVIYCLEVVKYYDEFSQHSVNEEMEELSESLNFVRGFVYEKDVTYIDFLNRVRTGELNLKSKGQWDVPHPWLNLFVPKSQISRFDYGVFKGIILRNNITTGPLLVYPMKRIMWNDQMSTAIPEEDVFYAVGFLRSAEFDNWEAYDKENMEVLMFCEDAKMDVIQYLPYHASQEGWVRHFGPRWNTFVERKYKYDPKMILSPGQNIFQ

SEQ ID NO: 539 - protein, 478 aa, Brassica napus
MVSYNFPSQIHLLMITILVIITTLLTPITTNTSSLPWNILSNDNFAGKLTTASSSVESAATDFGHITKIFPSAVLNPSSVQDITDLIKLSFDSQSSFPLAARGHGHSHRGQAAAKDGVVVNMRSMVNRDRGIKVSRTGLYADVDSAWLWIEVLNKTLELGLTPVSWTDYLYLTVGGTLSNGGISGQTFRYGPQISNVLEMDVITGKGEIATCSKDMNSDLFYAALGGLGQFGIITRARIKLELAPKKAKWLRFLYTDFSEFTRDQERLISETNGPHFLEGSVMLDHGPPDNWRSTYYPPSEHMRIVSMVKQHRVIYCLEVVKYYDETSQHSVNEEMEELSDSLNYERGFVYEKDVTYMDFLNRVRTGELKLKSKGKWDVPHPWLNLFVPKSQISRFEYGVFKGIILRNNITTGPLLVYPMNRNKWNDRMSTVIPEEDVFYAVGFLRSASFDNWDDYEKENMELFPPEYDSTKSRFSAL

SEQ ID NO: 540 - protein, 478 aa, Brassica napus
MVSYNFPSQIHLLMITILVIITTLFTPITTNTSSLPWNILSNDNFAGKLTTASSSVESAATDFGHITKIFPSAVLNPSSVQDITDLIKLSFDSQSSFPLAARGHGHSHRGQAAAKDGVVVNMRSMVNRDRGIKVSRTGLYADVDSAWLWIEVLNKTLELGLTPVSWTDYLHLTVGGTLSNGGISGQTFRYGPQISNVLEMDVITGKGEIATCSKDMNSDLFYAALGGLGQFGIITRARIKLELAPKNAKWLRFLYTDFSEFTRDQERLISETNGLHFLEGSVMLDHGPPDNWRSTYYPPSEHMRIVSMVKQHRVIYCLEVVKYYDETSQHSVNEEMEELSDSLNYERGFVYEKDVTYMDFLNRVRTGELKLKSKGQWDVPHPWLNLFVPKSQISRFEYGVFKGIILRNNITTGPLLVYPMNRNKWNDRMSTVLPEEDVFYAVGFLRSASFDNWDDYEKENMELFPPEYDSTKSRFSAL

SEQ ID NO: 541 - protein, 518 aa, Brassica napus
MASNNFPSQSHLLVIIIFITTLLTPITTNNTSPQPWNILSNDNFAGKLTSASSSVEAAAIDFGHVTKILPSAVLNPSSVQDIIDLIKLSFDSQSSFPIAARGHGHSFRGQAAAKDGVVVNMRSMVNEDRGIKVSRTGLYADVDTAWLWIEVLNKTLELGLTPVSWTDYLYLTIGGTLSNGGISGQTSRYGPQISNVLELDVITGKGEIATCSNDTNSDLFYAALGGLGQFGIITRARIKLELAPKRAKWLRFLYTDFSEFTRDQERLISETDGLHFLEGSVMLDHGPPDNWRSTYYPPSDHLRIVSMIKRYRVIYCLEVAKYYDETSQHSVNEEIEKLSESLNYVRGFVYEKDVTYIDFLNRVRTGELNLKSKGQWDVPHPWLNLFVPKSQISRFDYGVFKGIILRNNITTGPLLVYPMKRIMWNDQMSTAIPEEDVFYAVGFLRSAEFDNWEAYDKENMEVLKFCEDAKMDVIQYLPYHASQEGWVRHFGPMWNTFVERKYRYDPKMILSPGQNIFR

SEQ ID NO: 542 - protein, 531 aa, Brassica napus
MTSSFLLMTFAICTLIIAVGPSELLRIGAIDVDGHFTFKPSDLASVSSDFGMLKSPEEPLAVLHPSSAEDVARLIRTAYGSATAFPVSARGHGHSINGQASTGRNGVVVEMSHRNIGTPEPLVEPEEMYVDVWGGELWVDVLKKTLEHGLAPKSWTDYLYLSVGGTLSNAGISGQAFHHGPQISNVLELDVVTGRGEVMRCSEEENTRLFHGVLGGLGQFGIITRARISLEPAPQRVRWIRVLYSSFEVFTEDQEYLISMHGQSKFDYVEGFVIVDEGLVNNWRSSFFSPRNPVKISSVSSNGSVLYCLEITKNYHESESDTVDQEVEILMKKLNFIPTSVFTTDLQYVDFLDRVHKAELKLRSKNLWEVPHPWLNLFVPKSRISDFDKGVFKGILGNKTSGPILIYPMNKDKWDERSSAVTPDEEVFYLVALLRSALSDGEETQKLEYLKDQNRRILEFCEQAKINVKQYLPHHATQEEWVAHYGDKWDQFRSMKAEFDPRHILATGQKIFQNPSLALFRPSSSSSSASW

SEQ ID NO: 543 - protein, 535 aa, Brassica napus
MTREMTSSFLLVTFAICTLIIAVGPSELLRIGAIDVDGHFTFKPSDLASVSSDFGMLKSPEEPLAVLHPSSAEDVARLIRTAYGSATAFPVSARGHGHSINGQASTGRNGVVVEMSHRNIGTLEPLVEPEEMYVDVWGGELWVDVLKKTLEHGLAPKSWTDYLYLSVGGTLSNAGISGQAFHHGPQISNVLELDVVTGRGEVMRCSEEENTRLFHGVLGGLGQFGIITRARISLEPAPQRVRWIRVLYSSFEVFTDDQEYLISMHGHSKFDYVEGFVIVDEGLVNNWRSSFFSPHNPVKISSVSSNGSVLYCLEITKNYHESESDTVDQEVEILMKKLNFIPTSVFTTDLQYVDFLDRVHKAELKLRSKNLWEVPHPWLNLFVPKSRISDFDKGVFKGILGNKTSGPILIYPMNKDKWDERSSAVTPDEEVFYLVALLRSALSDGEETQKLEYLKDQNRRILEFCEQAKINVKQYLPHHATQEEWVDHYGDRWDQFRSMKTEFDPRHILATGQKIFQNPSLALFPPSPSSSSASW

SEQ ID NO: 544 - protein, 517 aa, Brassica napus
MIAYIEPYFLDNDADAASVTGQSFDGVSESLHIQGEILCGGAATDIAGKDFGGMNCVKPLAVVRPVGPEDIAGAVRAALRSDKLTVAARGNGHSINGQAMAERGLVLDMRSTAENHFEVGYLPGGAFVDVSGGALWENVLKRCVSEYGLAPRSWTDYLGLTVGGTLSNAGVGGQAFRYGPQTSNVTELDVVTGNGDVVTCSEVENSELFFSVLGGLGQFGIITRARVLLQPAPDMVRWIRIVYTEFDEFTRDAEWLVSQKDESSFDYVEGFVFVNGDDPVNGWPTVPLHPDHDFDPTQLPQSSGSVLYCLELALHYRDSDSNSTVDKRVERLIGRLRFVEGLRFEVDLPYVDFLLRVKRAEEIAKVNGTWETPHPWLNLFVSKRDIGEFDRTVFKELAKNGVGGPMLVYPLLRSRWDDRASVVLPEGEIFYIVALLRFVPTCAKTSSFEKMVAQNQEIVQWCVRKGIDFKLYLPHYKSREEWIRHFGNRWSRFVDRKTMYDPMAILSPGQKIFNRAP

SEQ ID NO: 545 - protein, 525 aa, Brassica napus
MIAYIEPYFLDNESDAASVLNVTGKSSDGVSESLNIQGEILCGGAAADIAGKDFGGMNCVKPLAVVRPLGPEDIAGAVRAALSSDKLTVAARGNGHSINGQSMAEGGLVVDMRSTAENHFEVGFLAGDGGGGTAFVDVSGGALWENVLKRCVSEYGLAPRSWTDYLGLTVGGTLSNAGVSGQAFRYGPQTSNVTELDVVTGNGDVVTCSEMENSELFFSVLGGLGQFGIITRARVLLQQAPDMVRWIRIVYAEFDEFTRDAEWLVSQKDESSFDYVEGFVFVNGDDPVNGWPTVPLHPDQDFDPTRLPQSSGSVLYCLELALHYRDSDSNSSVDKRVERLIGRLRFDDGLRFEVDLPYVDFLLRVKRSEEIAKVNGTWETPHPWLNLFVSKRDIGDFEQKVFKELVKNGVGGPMLVYPLLRSRWDDRTSVVLPEGEIFYIVALLRFVPPGAKASSVDKLVAQNQEIVQWCVKNGIDFKLYLPHYKSREEWIRHFGNQWSRFVDRKAMFDPMAILSPGQKVFNRAL

SEQ ID NO: 546 - protein, 567 aa, Brassica napus
MALASLFARSRRTASTFFLRSSRQLHSTPNKNGDVSSISAQKGRRRIWWSSSLVPLAIGAASAASFAVLSQSYPSISQSSALDSKGVKVGGKGSTELVVKGEYKEVPKELVAELKTILQDNLTTDYDERYFHGKPQNSFHKSVNIPDVVVFPRSEEEVSKILKSCNKYKVPIVPYGGATSIEGHTLAPKGGVCIDMSLMKRVKALHVEDMDVVVEPGIGWQELNEQLEQHGLFFPLDPGPGATIGGMCATRCSGSLAVRYGTMRDNVISLKVVLPNGDVVKTASRARKSAAGYDLTRLIIGSEGTLGVITEVTLRLQKIPQHSVVAVCNFPTVKDAADVAIATMMSGIQVSRVELLDEVLIRALNMANGKNLKEVPTLMFEFIGTEAYAREQTQIVQEIASKHNGSDFVFAEESEAKKELWKIRKEALWACYAMAPGHEAMTTDVCVPLSHLGELISRSKKELDASPLLCAVIAHAGDGNFHTCIMFDPNNEEQRKEAERLNNLMVHSALSMDGTCTGEHGIGTGKMKYLEKEHGIEALQTMKKIKRALDPNDIMNPAKLIPPHVCY

SEQ ID NO: 547 - protein, 464 aa, Brassica napus
MNCVKPLAVVRPVGSEDIAGAVRAALSSDKLTVAARGNGHSINGQSMAEGGLVVDMRSTAENHFEVGHYGGTAFVDVSGGALWENVLKRCVSEYGLAPRSWTDYLGLTVGGTLSNAGVSGQAFRYGPQTSNVTELDVVTGNGDVVTCSEMENSELFFSVLGGLGQFGIITRARVLLQPAPDMVRWIRIVYAEFDEFTRDAEWLVSQKDESSFDYVEGFVFVNGDDPVNGWPTVPLHPDQDFDPTRLPQSSGSVLYCLELALHYRDSDSNSSVDKRMERLLGRLRFDEGLRFEVDLPYVDFLLRVKRSEEIAKVNGTWETPHPWLNLFVSKRDIGDFEQKVFKELVKNGVGGPMLVYPLLRSRWDDRTSVVLPEGEIFYIVALLRFVPPGAKASSVDKLVAQNQEIVQWCVKNGIDFKLYLPHYKSREEWIRHFGNRWSRFVDRKAMFDPMAILSPGQKVFNRAL

SEQ ID NO: 548 - protein, 240 aa, Brassica napus
MNGDRPDSHYTETGFPYAASYMDFYGGAAQDDPLNYAHAGTMHPPHQDSLYWTMNTNAYKFGFSGSDNAAFYGSYDLNDHLSRMSIGRTNWEYHLPLVNVDESVPRSGDTDDHSDAEECIAIEHDPESPQVSWQDDIDPDTMTYEELIELGEAVGSESRGLSQELIETLPTRKYKFGSFFSRKRAGDRCVICQLKYKIGEKQMNLPCKHVYHSECISKWLNINKICPVCNSEVFGEPSIH

SEQ ID NO: 549 - protein, 152 aa, Brassica napus
MQLRSRRIVYRSEKASSSSSSCCASNNNRVIDLEEERDGETETSSCRRSSKRKLFENLREKESMENSQQIVAGFDSAVKESSDCCCSRKASLSTTEEKGKSTAEQPPTAVEIEDFFVEAEKQLHDNFKKKYNFDFEEEKPLEGRYEWVKLSE

SEQ ID NO: 550 - protein, 212 aa, Brassica napus
MAGGNVSVRGRRRELDVSEENEANTTPKRRKLEVDVESRIVFSPCVQSTSRGGTVVRNSAGASETSVVIVRRRESPVDEQCQIPSSVSCCSSNGSEEKTKRRIEFVDLEEDDDGDLDQTVTSWIYDNFNNTRRDMQHEDSTAMEVQEVECRRRLKMKKSRETVKEAELEDFFQAAEKDVRNNKMLECSWKYNFDFKKDEPLGGRYEWVKLNP

SEQ ID NO: 551 - protein, 199 aa, Brassica napus
MGRYIKKSKIAGGALPAKDISHQTASSFRTRAAKNLALQRLRSHSTPPCVDADSFRYLQLRSRRLVKLPLLADTRKQQQKQLINSVGKRQTTNPRANSVLLSEPTNLEEDCGSNLVNSGSGCSFGEKGLEFESGDRETTPCSLKRDSEEAIQSVPSHEIEDFFAFAEQQQQRFFTEKYNFDIVSENPLPGRYEWIKVVP

SEQ ID NO: 552 - protein, 176 aa, Brassica napus
MSERNLNSKRESRELEASSTSVSPLQKKKKLDDSSADSNAVVLAIPSPSVASSQGRCSVTSDDDDKSSIVSSGCFSSESNETVRNNPTSGADLEDTASEALGETTETEMESSSPALKRDNKPPEVSKIPTAEEIEAFLSELEGGEDKQKRFIEKYNFDIVNDKPLQGRYMWDRLKP

SEQ ID NO: 553 - protein, 166 aa, Brassica napus
MNEMSERDSKETSFEGSSIKRMRLDDGDDSAEETTVSSSSSSSLSYSAASDSEDEDHRSSSAIDTSLPFLDLEGEQQISETEVSSLITISFSRAQGSPSSEMDSATTTKTERQEKKAKAPPTQAELDDFFSAAERGQQKRFSDKYNYDIVNDTPLEGRYEWVSLKP

SEQ ID NO: 554 - protein, 196 aa, Brassica napus
MGKYIKKSKITGDIDSMEATEATSLGVRTRAAAKTLALKRLNSSSAPDSSCYLQLRSRRLEKPPSLAEPKQTPRQVKPGIKESGSKIDSVNSSVAGSGDECFCRENSPEFQTRQSTRESTPCNFVEDLETIVTPGSSTRSMRTPARDSTVPTIGELEEFFAYAEQQQQRLFMEKYNFDIVNDVPLPGGYEWVQVSP

SEQ ID NO: 555 - protein, 247 aa, Brassica napus
MGKYIKKNKLDGEALSLMDVSPSPSPLGVLTRAKSLALQKPPSSPSPNPPPSKQKMTDCSGGSYLQLRSRRLQKKPPPIVVIRSSKRRKQQQQRREEEGRNPNPNPQNSIRGSGGDGSSRSDSVAESVVFGKEKDFNGGINRELDGSESFNRTTSRESTPCSLIQKPESIPSPGSSTKLSNGISGNSNQREDSFSGSHRHLPTTPEMDEFFSGAEEEQQKQFIEKYNFDPVNEQPLPGRFEWKKVDD

SEQ ID NO: 556 - protein, 324 aa, Brassica napus
MALLSKPNEKTESGFSPIPVIDISDPESKHALVKACEDFGFFKVINHGVSSELVSVLEHEAVEFFSLPASDKTQVAGYPFGYGNREIGRNGDVGWVEYLLMNANLDFGSHSFFPGLFNNPETFRNALLEYTTSVRKMTSHVLEMITDGLGIEPRNTLSKLVSDKNTDSIFRLNHYPPCPHHINTNTNTNGGNNVIGFGEHTDPQIISVLRSNNTSGLQINLADGSWISVPSDPSSFFFNVGDSLQVLTNGKFKSVKHRVLANSRKSRVSMIYFAGPSLTQRIAPLSCLTDNEDESLYKEFTWSEYKNYAYHSRLSDNRLQPFER

SEQ ID NO: 557 - protein, 335 aa, Brassica napus
MVVLSQHVALDNHLSVIPTYKPVPVPVVDLTDPEAKTLIVKACEEFGFFKVVNHGVRPDLMTRLEQEAVGFFALPQSLKNQAGPPEPYGYGSKRIGPNGDVGWIEYILLNANPQLTSPKTSAIFRQTPQIFREAVEEYMKEVKKVTCKVLEMVTEGLGIEPRDTLSKMVRDEKSDSCLRMNHYPTAEEEVEKMVKVGFGEHTDPQIISVLRSNNTAGLQICMKDGSWVAVPPDHSSFFINVGDALQVMTNGRFKSVKHRVLADTRRSRVSMIYFGGPPLSQKIAPLPCLVPKQEDWLYKEFTWSQYKSSAYKSKLGDYRLGLFEKQPLLTHRSNV

SEQ ID NO: 558 - protein, 339 aa, Brassica napus
MVVSLKPKSVTLNNSQVHVNPKCKPSPVLIPVVNLTDPNAKTQIVKACEELGFFKVVNHGVRPEFLTQLEEEAIKFFALPQFHKDKAGPADPFGYGSKRIGPNGDVGWIEYILLNANSDTKTTAVFLQTTPTFREVVVLVEVFMEEMKDMSSKVLDMVAEELKIEPKDKLSKLVKVKESDSCLRMNHYPEKEETRRKEEIGFGEHTDPQLVSVLRSNNTEGLQICLKDGTWVDVPPDHSSFFVIVGDTLQVMTNGRFKSVKHRVLTNTKRSRLSMIYFAGPPLTEKIAPFSCLVPKQEDCLYREFTWSQYKSAAYKTKLGDYRLGLFEKQFPFSFSGTV

SEQ ID NO: 559 - protein, 325 aa, Brassica napus
MVKGSQKIVAADKGIPIIDMSQERSRVSMQIVKACETLGFFKVVNHGFDRTIISRMEQESINFFAKSVHEKKSVESVNQPFRYGFRDIGLNGDSGEVEYLLFHTNDPAFRSKPSFRSAVNCYIEAVRQLAHEILELTAEGLGVPPHTFSRLISSVDSDSILRVNHYPPSDQFFGGATHSDKSVSLTRVGFGEHTDPQILTVLRSNGVGGLQVSNPDGMWVPVFPDPSAFCVNVGDLLQVMTNGRFISVRHRALTYGKESRLSTSFFAGPPLQAKIGPLQAMVTTANQPRLYQTFTWSEYKKLAYSLRLEDSRLDMFRTGKGLEDP

SEQ ID NO: 560 - protein, 329 aa, Brassica napus
MVLPSSTPFPPTGKKAKASPEYNFPVIDFSTHDRSKLSEKIVKACEVNGFFKVINHGVRPEIISRFEHEGEEFFNKPESEKLRAGPASPFGYGCKNIGFNGDLGELEYLLLHANPTSVADKSETISHDDPFKFSSATNDYIHAVKDLACEIIDLTAENLWGQRSSEVSELIRDVRSDSILRLNLYPPAPYALRGVSQIGFGEHSDPQILTVLRSNDVDGLEICSQDGLWVPVPSDPTCFYVLVGDCLQALTNGRFTSVRHRVLANTAGKPRMSAMYFAAPPLEAKISPLPEMVSPANPRRYNSFTWGDYKKATYSLRLGVPRLEFFKTS

SEQ ID NO: 561 - protein, 249 aa, Brassica napus
MFREDKKLFDRSFNEKVREKFSDTSKHCYRWGNPNATSPTQYSFSEAFHITLAEILSFSDDGNNFRTTVAMYVQEVARVAHMICEILGNQVKVNSKYFENIFALQNSFLRLNKYHPCVFGSQVFGLVPHTDTSFITILAQDQIGGLELKKNGQWIGVKPCSEALTVNIGDMFQALSNGVYQSVRHRVIPPANVERLSIAFFVCPYQETEIECSGNPKKYRRFSFREYKEQSERDVKETGDKVGLSRFLI

SEQ ID NO: 562 - protein, 184 aa, Brassica napus
MEKFASESEALAYSLAEVLAEKSGRKSSFFKKTCVRNTCYLRMNRYPPCPKPSEVYGLMPHTDSDFLTILYQDQVGGLQLIKDNRWIAVKPNPRALIINIGDLFQAWSNGMYKSVEHRVMTNPTVERFSTAYFLCPSYDAVIDCSGDCPAYRNFSFGEFRQQVQEDVKKLGYKVGLPRFINDIY

SEQ ID NO: 563 - protein, 162 aa, Brassica napus
MDPPFNKTYKTLLYKQIKNTENSVPQTPFSFHVTAVVEEVELPLIDVSRLINGAEKEREKCKQDIASASREWGFFQVINHGISMDVLEKMRQEQIRVFREPFDKKIKSEKFSTGSYRWGTPSATCLRQLSWSEAFHVPMTDISDNKDFTTLRYTNIVLLINF

SEQ ID NO: 564 - protein, 536 aa, Glycine max
MVAGKYPSPTYFILLLITITRLISTVGKTSQWMKALTPPPELASVSLDDTIFSKLRNDPEALQGRASRDYGNLVREVPSAVFHPTSSSDIARLIKLSYNGSVPFKIAARGQGHSTRGQAMVRDGVVVDMAGFRERGNGEGIRVVMSVVVDPNNKNGEQLWIDVLNATLEHGLAPMSWTDYLYLTVGGTLSNAGISGQTFRYGPQITTVRQMDVITGKGEFVTCSQQTNSELFHAVLGGLGQFGIITRARIALAPAPKRVKWVRLLYNDFSAFTKDQEQLISITRRKQNIALDYLEGLLLMHQGPINNWRSSFFPLADHARIISLVTKHSVLYCLEVAKYYDGQNENNVDKELKVLLQGLSYIPGFYYEKDVSYVEFLNRVRSGELKLQSQGLWDVPHPWLNLFIPKSQIMEFDSGVFKNIILKRNITTGPVLVYPMNRNKWDNRMSASIPDEDIFYTVGFLHSSGFDNWKAYDAQNKEILQFCNDSGIKVKQYLPHYRTQEDWTNHFGPKWRTFVERKHQFDPKMILSPGQRIFNN

SEQ ID NO: 565 - protein, 535 aa, Glycine max
MALNYPFLTYFILLLVTITRLIFTVGKTEQWKAPILPELDIDNISHKLHDDPETIQMASRDYGHLTHEFPLAVFRPSSIDDIVTLIKSSYNSFAPFDIAARGQGHSTHGQAMARDGIVVDMASLRKQRNGVAISVSKDPLMGHYADVGGEQLWIDVLHATLEYGLAPVSWTDYLYLTVGGTLSNAGISGQSFRYGPQISNVHEMDVITGKGEFVTCSSQKNLELFHAVLGGLGQFGVIARARIALEPAPKRVKWVRLLYSDFSAFTKDQERLISINGRKQKNALDFLEGMLLMNQGPINNWRSSFFPLSDHPRIASLITEHSILYCLEVAKYYDEQTELNVDKEIEVLLQGLAYIPGFNYEKNVSYVEFLNRVRSGELKLQSQGLWEVPHPWLNLFIPKSQILDFNSGVFKDIVLKRNISSGPVLVYPMNRNKWDDRMSASIPDEDVFYTVGFLHSSGFDTWKAYDAQNREILEFCRDAGIMVKQYLPNHSTQEDWTNHFGAKWMKFLERKHQFDPRMILSPGQKIFHKKLQPVF

SEQ ID NO: 566 - protein, 543 aa, Glycine max
MVAENYPSPTYFILLFITITRLISTVGKTSQWTKALSLTPELASVSLDDTIFCKLRDDPEALQGRASRDYGNLVREVPLAVFHPASASDIARLIKLSYNGSVPFKIAARGQGHSTRGQAMAREGVVVDMAGFRERGNGVGIRVVSSVDPNNKNGYYYYADVGGEQLWIDVLHATLEHGLAPMSWTDYLYLTLGGTLSNAGISGQTFRYGPQITTVREMDVITGKGEFVTCSQQTNSELFHAVLGGLGQFGIITRARIALAPAPKRVKWVRLLYNDFSAFTKDQEQLISVTGRKQNVSLDYLEGLLLMHQGPINNWRSSFFPLADHARIISLVTKHSVLYCLEVAKYYDGQNENNVDKELQVLLQGLSYIPGFYYEKDVSYFEFLNRVRSGELKLQSQGLWDVPHPWLNLFIPKSQIMEFDSGVFKNIILKRNITTGPVLVYPMNRNKWDNRMSASIPDEDIFYTVGFLHSSGFDNWKAYDAQNKEILQFCNVAGIKVKQYLPHYRTQEDWANHFGPKWRTFVERKHQFDPRMILSPGQRIFNN

SEQ ID NO: 567 - protein, 535 aa, Glycine max
MALHYPFPTYFILLLVTITRLIYTVGKTEQWKAPILTELDINNISHKLHDDPEIIQMASRDYGHIVHEFPLAVFRPSSIDDIATLIKSSYNSFAPFGIAARGQGHSTHGQAMARDGVVVDMANLRKQRNGVAISVSKDPLMGHYADVGGEQLWIDVLHTTLKHGLAPVSWTDYLYLTVGGTLSNAGISGQSFRYGPQISNVHEMDVITGKGEFVTCSSQKNLELFHAVLGGLGQFGVIARARIALEPAPKRVKWVRLLYSDFFAFTKDQERLISINGRKQKNALDFLEGMLLMNQGPINNWRSSFFPLSDHPRISSLITEHSILYCLEVAKYYDEQTEINVDKEIQVLLQGLAYIPGFYYEKNVSYVEFLNRVRSGELKLQSQGLWDVPHPWLNLFIPKSQILDFNSRVFKDIVLKRNISSGPVLVYPTNRNKWDDRMSASIPDEEVFYTVGFLHSSGFDTWKAYDAQNSEILEFCRDAGIKVKQYLPNHSTQEDWTNHFGAKWIKFLERKHQFDPRMILSPGQKIFHKQLQPAF

SEQ ID NO: 568 - protein, 510 aa, Glycine max
MDDLTDIEKEDIDRAIALSLSEEDHKGKKVVDYDSQSEDEELCKIDDEEDEHLVKVHLEEEERLAKIQQEEEERLAKIQQDERLAKIQQEDERLAKAQLEEDEQLARAIQESLKIGSPPRYDNDSSILSFPHLFPPGYRICAGCKTEIGQGRFLSCMGGVWHPECFCCHACHLPITDYEFSMSSNRPYHKACYREKHHPRCDVCKNFIPTNSSGLIEYRAHPFWLQKYCPSHELDGTPRCCSCERMESRDTKYLLLDDGRKLCLECLDSSIMDTHECQPLYLEIQEFYEGLNMKLEQQIPMLLVERQALNEAMEGEKNGHHHLPETRGLCLSEEQTVTTISRRPRIGAGYRAIDMITEPYRLIRHCEVTAILVLYGLPRLLTGSILAHEMMHAWLRLKGYPNLSPEVEEGICQVLAHMWLESELYSGTGNDGASSSASSSSSSSPSSSVSTKKGKRSDFEKKLGEFFKHQIESDTSSAYGDGFRLGNQAMLKYGLKRTLDHIHMTGSFPY

SEQ ID NO: 569 - protein, 545 aa, Glycine max
  misc_feature (545)..(545): Xaa can be any naturally occurring amino acid
MVSSKPGGFYEQGRFPSIKILILVLLNSILHKANSGSNNSASNSLVPFPPHEILSSLQTLPLHGHFSLRDNEDAAKDFGNIHHFPPLAVLHPKTVSDISLTIKHVFEMGFASQLKIAARGHGHSLQGQAQVHGGLVINMESLQGPEIKVYNGELPYVDVSGGELWINILHETLKHGLAPKSWTDYLHLTVGGTLSNAGISGQAFKHGPQINNIFQLEVITGKGEVVTCSGNRNADLFYGVLGGLGQFGIITRARISLEPAPMMVKWIRVLYSEFSTFTMDQEYLISLNNTFDYIEGFVIINRTGILNNWRSSFDPKNPLQASQFSSDGKTLYCLEMAKYFNPDEAEAMNQSVDQLLSKLSYIPSTLFLSEVSYVEFLDRVHVSENKLRAQGLWEVPHPWLNLLIPRSEIHDFAEEVFGNILKDTSNGPILIYPVNQTRWNSRPSLVTPEEDVFYLVALLSSALPNSTGADSLEHILAQNNKIIDFYTGAQLRVKQYLPHYSTQEEWQVHFGSRWEAFVERKRAYDPLALLAPGHRIFQKAVSSSX

SEQ ID NO: 570 - protein, 478 aa, Glycine max
MGWLSRIFKGSDHNKLSEGHYYKEDAGYYLPSTSGVTNDAWNQSQNQNENEDIDRAIALSLVEETQKANNNVNDYRSQLEEDEQLARAIEQSLNLESPPRYGNENMYQPPIQYFPMGSRICAGCYTEIGYGRYLNCLNAFWHPECFRCRACNLPISDYEFSTSGNYPYHKSCYKESYHPKCDVCKHFIPTNPAGLIEYRAHPFWIQKYCPTHEHDGTTRCCSCERMESQEAGYIALKDGRKLCLECLDSAIMDTNECQPLHADIQRFYESLNMKLDQQIPLLLVERQALNEAREGEKNGHYHMPETRGLCLSEELSTFSRRPRLGTTMDMRAQPYRPTTRCDVTAILILYGLPRLLTGSILAHEMMHAWLRLKGYRTLSQDVEEGICQVLSHMWLESELSSASGSNFVSASSSSASHTSRKGKRPQFERKLGEFFKHQIESDISPVYGGGFRAGQKAVSKYGLQRTLHHIRMTGTFPY

SEQ ID NO: 571 - protein, 428 aa, Glycine max
MGNKLGRRRQVVDEKYTRPQGLYNHKDVDHKKLRKLILESKLAPCYPGDEETTYDREECPICFLYYPSLNRSRCCTKSICTECFLQMKVPNSTRPTQCPFCKMANYAVEYRGVKSKEEKGLEQIEEQRVIEAKIRMRQQELQDEDERMHKRLEMSSSNVNVAVADVEYSSNAVSASSVSVVENDEIVSSQDSCATSVVRPNATTRTNRDDEFDVDLEDIMVMEAIWLSIQENGRQRNLSFSDATSGHYVADGRYVSSASSITGPPTGSSSSPSGGLACAIAALAERQQMAGESSMSITDENMPSFNTLPGSRRFYNRLGRDMAYYPPAENLNEEPLDEAVAMTRSHGEWDTDHGTPLTETATSYTNSVTAEDRGELSSLLRSDDIDGSLQSAPEPIVPESFEEQMMLAMAVSLAEARAMSSGQSASWQ

SEQ ID NO: 572 - protein, 500 aa, Glycine max
MWDLNDSPDQRKDYESEGCSSSLYDDKGKRVASVSNSSSSAVVVEDGSEEEDSERGGSRTLDNKKTNKIFGFSVAHDDSDHPPVTHQFFPVEDSELPVTAAAAAAGSSFPRAHWVGVKFCQSETPGAGKAVKVSEPMKKSRRGPRSRSSQYRGVTFYRRTGRWESHIWDCGKQVYLGGFDTAHAAARAYDRAAIKFRGVEADINFNIEDYEEDLKQMTNLTKEEFVHVLRRQSTGFPRGSSKYRGVTLHKCGRWEARMGQFLGKKYVYLGLFDTEIEAARAYDKAAIKCNGKEAVTNFDPSIYDGELNSESSGGVAADHNLDLSLGNLISKHSNSQSSRNHFPNSATDQHMPPESNWQSGGSKPKLVNILPKPCGRSNMEAYGQGESETLRLLSQTHLQSPTTKEMHRYGPYRSPAEPQMPHNFAHHLHQPSFHVPSSSSNRGRIGSDLSLSMSDQQQWQQAGPPHLLATAAASSGFPQQIRPSQGWLQKNGFHSLMRPS

SEQ ID NO: 573 - protein, 373 aa, Glycine max
MYQPPIQYFPLGSRICAGCYTEIGFGRYLNCLNAFWHPECFRCRACNLPISDYEVSTSGNYPYHKSCYKESYHPKCDVCKHFVPTNPAGLIEYRAHPFWIQKYCPTHEHDGTPRCCSCERMESQEAGYIALKDGRKLCLECLDSSIMDTNECQPLHADIQRFYDSLNMKLDQQIPLLLVERQALNEAREGEKNGHYHMPETRGLCLSEELSTFSRRPRLGTAMDMRAQPYRPTTRCDVTAILVLYGLPRLLTGSILAHEMMHAWLRLKGYRTLSQDVEEGICQVLAHMWLESELSSASGSNFVSASSSSASHTSRKGKRPQFERKLGEFFKHQIESDISPVYGDGFRAGQKAVRKYGLQRTLHHIRMTGTFPY

SEQ ID NO: 574 - protein, 247 aa, Glycine max
MNDGRQMGVNYVDAGFPYAVNENFVDFFQGFTPVPVNYAFAGSIPDQESVYWSMNMNPYKFGLSGPGSTSYYSSYEVNGHLPRMEIDRAEWEYPSTITTVEEPATTDSPPRRDGVTNMQTIPEECSPNHHESNSSSQVIWQDNIDPDNMTYEELLDLGEAVGTQSRGLSQELIDMLPTSKYKFGNLFKRKNSGKRCVICQMTYRRGDQQMKLPCSHVYHGECITKWLSINKKCPVCNTEVFGEESTH

SEQ ID NO: 575 - protein, 168 aa, Glycine max
MEMAQVKARARTALAMAASATSPKRRKISFVQIKSLSNATSPTTEERISGESPASCCSSNGSFDNENRIIKSSDLEVESAQVETWTCNCGEQQQQKIRREMSLTREVDSTEEHITKTKSRCVPTESELEDFFAAAEKDIQKRFTDKYNYDFVKDMPLEGQYEWVKLKS

SEQ ID NO: 576 - protein, 184 aa, Glycine max
MEMAQVKARARTALAMAASASSRKRRKISINNNFVQIKSLSNATVPATGERISGESPASCCSSNGSVDDENRIIKFSDLEVESTRVVTSTCDCGEQQQQIRREMSLTSELRITNSSSQEVDSAEEQITQTKSLPPQKMPTELELDEFFAAAEKDIRKRFSDKYNYDIVKDVSLEGRYEWVKLKP

SEQ ID NO: 577 - protein, 201 aa, Glycine max
MGKYMKKSKIAGDVAAVIMEAPPPHSHLGVRTRAKTLALQNNTTSPDPSAYLQLRSRRLLKLPPTPPENPRRSSAETAANFRLANAQKLASFEDDNNTECSFGENFLDAEPREERSTREGTPCSLIRDSNAIHTPGSTTRPRTRQIIHEHVQRNIPTAYEMEEFFAYAEKQQQTIFMDKYNFDIVNDVPLPGRYEWVPVLH

SEQ ID NO: 578 - protein, 176 aa, Glycine max
MGECKRCSLTIAAIEQPSSSQHSISKKRKTTASFQLRSSDTQFPDTIVSPEASVSSTGTVVSGDFCSDRSCCSSSHFKDLHSVPSDLQTKGFQTVEDSTNRYFKPFSLLSEFSGDSEESAKSSAAVRKLKTPPQAEIEEFFAMAEKYERKRFTEKYNFDIVRDLPLEGRYQWVRLH

SEQ ID NO: 579 - protein, 187 aa, Glycine max
MGECKRCCSLTVLAMEEPSSSQHSIFKKRKTTATAAHSTSFQLCSSDMQFPHTIVSPEVSFSSACTVVSGEFCSDRSCCSSSHVKDLHSVPSDLQTKGFETVEDSTSLNFKSFSLLSEFSGDSEESAMIPAKSSAAVLKVKTPPKAEIEEFFAMAEKYEQKRFTEKYNFDIVRDLPLEGRYQWVRLH

SEQ ID NO: 580 - protein, 205 aa, Glycine max
MGKYMKKSKIAGDVAAVIMEAPPPHSHLGVRTRAKTLALQNTSPDSSAYLQLRSRRLLKLPPTPPENPRRSAAETAANSRLAKTTSSRNAEKFASFDDDNNTECSFGENFLDAEPREERSTRESTPCSFIRDSNAIHTPGSTTRPRTRQIIHEHIQRNIPTAYEMEEFFAYAEKQQQTIFMDKYNFDIVNEVPLPGRYEWVPVLH

SEQ ID NO: 581 - protein, 224 aa, Glycine max
MGKYMKKAKPKGELALVESTTSNTTTSYMGVRTRAKTLALQKSHAQQHELAATSDSYLQLRSRRLQKPPILVHSPKRPKHPNPKSPIPEPPRLGLASERDATLNHNKDNTLHENAEPQEASFGENVLDFEGRERSTRESTPCSLIRDSDTVRTPGSTTRPTCSAEAYRRTEHAARRQIPTSREMDEFFAEIEEAQQKKFIEKYNFDPVNEKPLSGRYEWEKLKP

SEQ ID NO: 582 - protein, 326 aa, Glycine max
MVLLSKATTEQYSYIKNYMPTAFSSTIPIVDLSKPDAKTLIVKACEEFGFFKVINHGVPIEAISQLESEAFKFFSMPLNEKEKAGPPKPFGYGSKKIGHNGDVGWVEYLLLNTNQEHNFSFYGKNAEKFRCLLNSYMSSVRKMACEILELMAEGLKIQQKNVFSKLLMDKQSDSVFRVNHYPACPELAVNGQNLIGFGEHTDPQIISLLRSNNTSGLQIFLRDGNWISVPPDHKSFFINVGDSLQVMTNGRFRSVRHRVLANGFKSRLSMIYFGGPPLSEKIAPLPSLMKGKESLYKEFTWFEYKNSTYGSRLADNRLGHFERIVA

SEQ ID NO: 583 - protein, 333 aa, Glycine max
MVVLSQPALNQFFLLKTCKPTPLFAGIPVVDLTDPDAKTHIVNACRDFGFFKLVNHGVPLQFMANLENETLGFFKKPQSEKDRAGPPDPFGYGSKRIGPNGDVGWVEYLLLNTNPDVISPKSQFIFREGPQNFRAVVEEYIRAVKNMCYEVLELMAEGLGITQRNVLSRLLKDEKSDSCFRLNHYPPCPEVQALNGRNLVGFGEHTDPQIISVLRSNSTSGLQICLTDGTWVSVPPDQTSFFINVGDTLQVMTNGRFKSVKHRVLADPTKSRLSMIYFGGPPLCEKIAPLPSLMLKGEESFYKEFTWWEYKKAAYASRLADNRLGPFEKSAAD

SEQ ID NO: 584 - protein, 326 aa, Glycine max
MVLLSKATTEQYSYIKNYMPTAFSSTIPVVDLSKPDAKTLIVKACEEFGFFKVINHGVPMETISQLESEAFKFFSMPLNEKEKVGPPKPYGYGSKKIGHNGDVGWVEYLLLNTNQEHNFSVYGKNAEKFRCLLNSYMSSVRKMACEILELMAEGLKIQQKNVFSKLLMDKESDSVFRVNHYPACPELVNGQNMIGFGEHTDPQIISLLRSNNTSGLQIFLRDGNWISVPPDHKSFFINVGDSLQVMTNGRFRSVKHRVLTNGFKSRLSMIYFGGPPLSEKIVPLSSLMKGKESLYKEFTWFEYKNLTYASRLADNRLGHFERIVAS

SEQ ID NO: 585 - protein, 333 aa, Glycine max
MVVLSQPALNQFFLLKTCKPTPLFSGIPVVDLTDPDAKTHIVKACRDFGFFKLVNHGVPLEFMANLENETLRFFKKPQSDKDRAGPPDPFGYGSKRIGPNGDVGWVEYLLLNTNPDVISPKSQFIFRESPQNFRVVVEEYIRALKNMCYEVLELMAEGLGITQRNALSRLLKDEKSDSCFRLNHYPPCPEVQALNGRNLVGFGEHTDPQIISVLRSNSTSGLQICLTDGTWVSVPPDQTSFFINVGDTLQVMTNGRFKSVKHRVLADPTKSRLSMIYFGGAPLSEKISPLPSLMLKGEESFYKEFTWWEYKKAAYASRLADNRLAPFEKSAAD

SEQ ID NO: 586 - protein, 384 aa, Glycine max
MTSFAQSQTKFSLFHLFIDSPKAFQISLFLSHVPSPYLSLHFLTPQNRITAEQTTRKMVLLSKATTEQYSYIKNCMPTKFSSTIPIVDLSKPDAKTLIVKACEEFGFFKVINHGVSMEAISELEYEAFKFFSMSLNEKEKVGPPNPFGYGSKKIGHNGDVGWIEYLLLNTNQEHNFSVYGKNPEKFRCLLNSYMSSVRKMACEILELMAEGLKIQQKDVFSKLLMDKQSDSIFRVNHYPACPEMTLNDQNLIGFGEHTDPQIISLLRSNNTSGLQIYLRDGNWISVPPDDKSFFINVGDSLQVMTNGRFRSVRHRVLANGFKSRLSMIYFGGPPLSEKIAPLSSLMKGKESLYKEFTWFEYKKSIYGSRLSKNRLEHFERIAAS

SEQ ID NO: 587 - protein, 335 aa, Glycine max
MVVLSHQSALNELFLVKTCKSTFIGVPEVDLTHPEAKTTIVKACQEFGLFKVVNHGVPLELMTHLENEALKFFMQPQSLKDKAGPPDPYGYGSKRIGTNGDLGWVEYLLLNTNPDVISPKTLQLFEQNPEMFRCGVEEYIGAVKKICCEALELMADGLEIVPRNVFSRMIRDERSDSCFRMNRYPECPELKVEALSGRNLTGFGEHTDPQIISVLRSNNTSGLQICLPDGDGDGTTWASIQPDHTSFFINVGDLLQVMTNGSFKSVKHRVLVDSSMSRLSMIYFGGPPLNEKIAPLPSLVSREEESLYRELTWLEYKNAAYKSKLSDNRLSLFDK

SEQ ID NO: 588 - protein, 342 aa, Glycine max
MVLASPNSIRSEGILPSNELIPVVDLTAERSQVTKLIVKACEEYGFFKVINHGISHEVISKTEEAGFSFFTKPVAEKKVAAPAYGCKNIGLNGDMGEVEYLLLSATTHSISQISKTISTDPLNVRCDTIVTSSLSFFNSTLSAYTEAVRELACEILELIAEGLGVPDTWIFSRFIRDVDSDSVLRLNHYPPIINKDNNKDMSQKFTKVGFGEHSDPQIITILRSNEVGGLQISLQDGVWIPVTPDPSAFYVNVGDVLEVMTNGRFVSVRHRAMTNSYKCRMSVAYFGAPPLHATIVAPSVMVTPQRPSLFRPFTWAEYKKATYSLRLGDTRIQLFTNKLNHS

SEQ ID NO: 589 - protein, 524 aa, Oryza Sativa
MAARCSIAFMIMASCLSVVVSGGLPGDLFALSVASKLRVDRNSTARASSDFGRIVAAAPEAVLHPATPAEIAELVRFSASSPSPFPVAPRGQGHSARGQSLAPGGVVVDMRALASRRGRVNVSAGAAPYVDAGGEQLWADVLRATLEHGLAPRVWTDYLRITVAGTLSNAGIGGQAFRHGPQIANVLELDVITGTGDMVTCSRDKDSDLFFAVLGGLGQFGIITRARIGLMPAPKRVRWVRLAYSDVATFTKDQELLISKRASEAGFDYVEGQVQLNRTLTEGPKSTPFFSSSDIGRLAGLASKSVSGVIYVIEGTMYYNESTSTTMDQKLESILGQLSFEEGFVFTKDVRYVQFLDRVREEERVLRSIGMWDVPHPWLNLFVPRSRILDFDAGVFKGVFAGANPVGVILMYPMNTNMWDDCMMAVASDDDVFYAVGLLRSAAVIGDVERLEKENEAVLAFCHNEDIGCKQYLPYYTSQDGWQRHFGAKWSRVADLKAKYDPHRILSPGQRIFSSPASMVVVSM

SEQ ID NO: 590 - protein, 528 aa, Oryza Sativa
MMPRAQLTTFLIVTSFLSTVPYLRAPVHGGVLTSYDVSSLDIMSKIHTDHDATTKASSDFGHIVHATPNGVFRPTFPADIAALIRLSLSQPTPFTVAPRGKGHSSRGQAFAPGGIVVDMSALGDHGHHTSHRIDVSVDRMYVDAGGEQLWIDVLHTALKHGLTPRVWTDYLRITVGGTLSNAGIGGQAFRHGPQISNVHELDVVTGMGEMITCSPEVNSALFFAVLGGLGQFGVITRARIRLEPAPKRVKWVRIAYSDVHPFTTDQELLISKWASGSGFDYVEGQVQLNRTLTQGRRSSSFFSATDLARLTGLAIDTGSVAIYYIEGAMYYDDNTAASVDQKLDALLEELSFVRGFVFVRDASYVEFLDRVGREEQNLRSAGAWDVPHPWLNLFVPRSRILHFDAAVFKGILRNANPVGLILMYPMNKDMWDDRMTAMTPDEDVFYAVGLLRSAVAGGSGGDVEQLERENAAVLELCDLAGGGIGCRQYLPHHASRDGWRRHFGAKWGRVADLKARRLICEGAEWFGL

SEQ ID NO: 591 - protein, 486 aa, Oryza Sativa
MGWLTKFFRGSTHKISEGQYHSKPAEETIWNGPSNSAVVTDVPSEFDNEDIARAISLSLLEEEQRKAKAIEKDMHLEEDEQLARAIQESLNVESPPRARENGNANGGNMYQPLPFMFSSGFRTCAGCHSEIGHGRFLSCMGAVWHPECFRCHACNQPIYDYEFSMSGNHPYHKTCYKERFHPKCDVCKQFIPTNMNGLIEYRAHPFWLQKYCPSHEVDGTPRCCSCERMEPRESRYVLLDDGRKLCLECLDSAVMDTSECQPLYLEIQEFYEGLNMKVEQQVPLLLVERQALNEAMEGEKTGHHHLPETRGLCLSEEQTVSTILRRPRMAGNKVMEMITEPYRLTRRCEVTAILILYGLPRLLTGSILAHEMMHAWLRLKGYRTLSPDVEEGICQVLAHMWIESEIIAGSGSNGASTSSSSSASTSSKKGGRSQFERKLGDFFKHQIESDTSMAYGDGFRAGNRAVLQYGLKRTLEHIRLTGTFPF

SEQ ID NO: 592 - protein, 521 aa, Oryza Sativa
MRPSLLQYLKLLLLLALGGVTTMHVPKQDVPSSLEELTLDGHFSFHDVSAAAQDFGNLSSFPPVAVLHPGSVADIATTIRHVFLMGEHSTLTVAARGHGHSLYGQSQAAEGIIISMESLQSNTMRVNPGVSPYVDASGGELWINVLHETLKYGLAPKSWTDYLHLTVGGTLSNAGVSGQTFRHGPQISNVNELEIVTGRGDVITCSPEQNSDLFHAALGGLGQFGVITRARIPLEPAPKMVRWLRVLYLDFTSFTEDQEMLISAEKTFDYIEGFVIINRTGILNNWRSSFNPQDPVRSSQFESDGKVLFCLEMTKNFNPDEADVMEQEVNTLLSQLRYMPSSLFHTDVTYIEFLDRVHSSEMKLRAKGMWEVPHPWLNIIIPRSMIHKFAKEVFGKILKDSNNGPILLYPVNKSRWDNRTSVVIPDEEVFYLVAFLSSALGPHNIKHTLDLNYRIIEFSDKAGIGVKQYLPNYTTEQEWQSHFGARWDTFQQRKKAYDPLAILAPGQRIFQKASASLPLPS

SEQ ID NO: 593 - protein, 486 aa, Oryza Sativa
MGWLNKIFKGSVNRVSRGHYDGSWHEGHSSDNARGAYDESDNEDIDRAIALSLSEEQNKGKAVDIDYNLEEDEQLARALQESLNADSPPRQNIPVENVPSEPPRELPPILFASSGSRTCAGCKNPIGHGRFLSCMDSVWHPQCFRCFACNKPISEYEFAMHEDQPYHKSCYKDFFHPKCDVCKNFIPTNRNGLIEYRAHPFWMQKYCPSHEDDGTPRCCSCERMEPMDIKYITLDDGRKLCLECLNSSIMDTPECQQLYMDIQEFFEGLNMKVEQQVPILLVERQALNEALETEKNGHHLPETRGLCLSEEQIVRTILRRPIIGPGNRIIDMITAPYKLERRCEVTAILILYGLPRLQTGSILAHEMMHAYLRLKGFRSLSPQVEEGICQVLSHMWLESEIIFGSSIDISATSVASSSSSSSTPTTSKKGAKTEFEKKLGAFIKHQIETDSSEAYGDGFRAANRAVESYGLRSTLNHMKMTGSFPY

SEQ ID NO: 594 - protein, 460 aa, Oryza Sativa
MWDLNDSPAAEAAPPPLSPSADDSGASSSSAAAVVEIPDDADDDSAAVVVVTRQFFPPAVPGGGGDPAPGNARAGWLRLAGAAPPVAATGPAASAAVSKKSRRGPRSRSSQYRGVTFYRRTGRWESHIWDCGKQVYLGGFDTAHAAARAYDRAAIKFRGVEADINFSLEDYEDDLKQMSNLTKEEFVHVLRRQSTGFPRGSSKYRGVTLHKCGRWEARMGQFLGKKYVYLGLFDTEEEAARAYDRAAIKCNGKDAVTNFDPSIYAGEFEPPAAATGDAAEHNLDLSLGSSAGSKRGNVDGGGDDEITGGGGGGAGSDQRVPMAFDLDWQTAAARSTKAKFDQNSNHPQMPPVLQVTHLPFSPRHHHQFLSNGDPGTAGGLSLTIGAGMAGHWPPQQQQGWGNAGGMSWPHPPHPPPPPTNAAAAATATAAAASSRFPPYIATQASTWLQKNGFHSLTRPT

SEQ ID NO: 595 - protein, 532 aa, Oryza Sativa
MAAIYLLIAALIASSHALAAHGAGGGVPLAAAAPLPFPGDLAASGKLRTDPNATVPASMDFGNITAALPAAVLFPGSPGDVAELLRAAYAAPGRPFTVSFRGRGHSTMGQALAAGGVVVHMQSMGGGGAPRINVSADGAYVDAGGEQLWVDVLRAALARGVAPRSWTDYLHLTVGGTLSNAGVSGQTYRHGPQISNVLELDVITGHGETVTCSKAVNSDLFDAVLGGLGQFGVITRARVAVEPAPARARWVRLVYADFAAFSADQERLVAARPDGSHGPWSYVEGAVYLAGRGLAVALKSSGGFFSDADAARVVALAAARNATAVYSIEATLNYAANATPSSVDAAVAAALGDLHFEEGFSFSRDVTYEEFLDRVYGEEEALEKAGLWRVPHPWLNLFVPGSRIADFDRGVFKGILQTATDIAGPLIIYPVNKSKWDAAMSAVTPEGEEEVFYVVSLLFSAVANDVAALEAQNRRILRFCDLAGIGYKAYLAHYDSRGDWVRHFGAKWDRFVQRKDKYDPKKLLSPGQDIFN

SEQ ID NO: 596 - protein, 250 aa, Oryza Sativa
MNGSRQMELHYINTGFPYTITESFMDFFEGLTYAHADFAIADAFHDQANPYWAMMHTNSYKYGYSGAGNYYSYGHVYDMNDYMHRADGGRRIWDNATPVNNTESPNVVLQGGETPHANTSSTTEECIQQQVHQNSSSPQVIWQDNIDPDNMTYEELLDLGEAVGTQSRGLSQERISLLPVTKYKCGFFSRKKTRRERCVICQMEYRRGNLQMTLPCKHVYHASCVTRWLSINKVCPVCFAEVPGDEPKRQ

SEQ ID NO: 597 - protein, 194 aa, Oryza Sativa
MGKYMRKAKVVVSGEVVAAAVMELAAAPLGVRTRARSLALQKRQGGEYLELRSRRLEKLPPPPPPPPRRRATAAAATADATAAESAEAEVSFGGENVLELEAMERNTRETTPCSLIRDPDTISTPGSTTRRSHSSSHCKVQTPVRHNIIPASAELEAFFAAEEQRQRQAFIDKYNFDPVNDCPLPGRFEWVKLD

SEQ ID NO: 598 - protein, 327 aa, Oryza Sativa
MVVLAGPPAVDHIPLLRSPDPGDVFSGVPVVDLGSPGAARAVVDACERYGFFKVVNHGVATDTMDKAESEAVRFFSQTQPDKDRSGPAYPFGYGSKRIGFNGDMGWLEYLLLALDDASLADACTVPSCAVFRAALNEYISGVRKVAVRVMEAMSEGLGIAQADALSALVTAEGSDQVFRVNHYPPCRALQGLGCSVTGFGEHTDPQLVSVLRSNGTSGLQIALRDGQWVSVPSDRDSFFVNVGDSLQVLTNGRFKSVKHRVVANSLKSRVSFIYFGGPPLAQRIAPLPQLLGEGEQSLYKEFTWDEYKKAAYKSRLGDNRLAQFEKK

SEQ ID NO: 599 - protein, 433 aa, Brassica napus
MARCHGSLAIFLCVLLMLACCQALSSNVDDGYGHEDGSFETDSLIKLNNDDDVLTLKSSDRPTTESSTVSVSNFGAKGDGKTDDTQAFKKAWKKACSTNGVTTFLIPKGKTYLLKSIRFRGPCKSLRSFQILGTLSASTKRSDYSNDKNHWLILEDVNNLSIDGGSAGIVDGNGKIWWQNSCKIDKSKPCTKAPTALTLYNLNNLNVKNLRVRNAQQIQISIEKCNSVDVKNVKITAPGDSPNTDGIHIVATKNIRISNSDIGTGDDCISIEDGSQNVQINDLTCGPGHGISIGSLGDDNSKAYVSGINVDGATLSETDNGVRIKTYQGGSGTAKNIKFQNIRMDNVKNPIIIDQNYCDKDKCEQQESAVQVNNVVYRNIQGTSATDVAIMFNCSVKYPCQGIVLENVNIKGGKASCKNVNVKDKGTVSPKCP

SEQ ID NO: 600 - protein, 433 aa, Brassica napus
MAHCWTVLTGLLVWSLLMLSWCEASRNNINRYDHSYGTFKSNSLIKRRDDITRLKSVARASLRLPTTVSVSDFGAKGDGKTDDTQAFVNAWKKACSSSGPVNLLVPEGKTYFLKSLRLNGPCKSVLTVQILGTLSASQQRSDYKDLSKWITFDGVNSLTVDGGATGTVNGNGETWWENSCKRNEAKKCTKAPTALTFYNSKNLRVNNLRVKDAQQIQISIEKCSNVQVSNVEVTAPADSPNTDGIHITNTQNIQVSKSIIGTGDDCISIESGSQNVKINDLTCGPGHGISIGSLGDDNSKAFVSGVTVDGAKLSGTDNGVRIKTYQGGSGTASNIIFQNIQMENVKNPIIIDQDYCDKSKCTEQKSAVQIKNVVYRNISGTSASDIAITFNCSKNYPCQGIVLDKVNIKGGKASCSNANVMDKDGVLPQCKST

SEQ ID NO: 601 - protein, 364 aa, Brassica napus
MMSESMSISVNGQSQVPPGFRFHPTEEELLQYYLRKKVNSIKIDLDVIRDVDLNKLEPWDIQEMCKIGTTPQNDWYFFSHKDKKYPTGTRTNRATTVGFWKATGRDKIIYSNGRRIGMRKTLVFYKGRAPHGQKSDWIMHEYRLEDNVISPEDVTVHEVVTIIGEASQDEGWVVCRIFKKKNLHKTLNSPIGGASLSGSGDMATTSSSSQFFNDDSFEQFLELMGRSCKEELNLDPLMKLPNLESPKSQTFNNNCHVSSPDTNHVIQISNVIDTRFVSSWSALDRLVASQLNGPSISAVDESHADQDHLALPSLRSPYPSLNRSSSYHDGLSQEHPAELELWNTTTSSLSSSSGPFFHVSNGSG

SEQ ID NO: 602 - protein, 371 aa, Brassica napus
MISLPSSMAESKVNLSINGQSKVPPGFRFHPTEEELLHYYLRKKVHSQKIDLDVIREVDLNKLEPWDIQEECRIGSTPQNDWYFFSHKDKKYPTGTRTNRATVSGFWKATGRDKIIYSCVRRIGLRKTLVFYKGRAPHGQKSDWIMHEYRLDETPTTNEYSDVVSEDPMSYNEEGWVVCRVFRKKNYQKIDDSPKITLSSSPGDTEEKKRSTTSHNTQNGNVLDHVLLYMDRSCPNICMPELQTTIQRQHNQDDILFMQLPSLETPKSEDLVDQSLNIPNQLDSSLVQEKKNGRPVCSNWASLDRLVAWQLNNGHHKCDRASFDEEEEDGDTMMQRWDLHWSNDDHVDLWSSFTESSSSPSSLDPLLHLSV

SEQ ID NO: 603 - protein, 406 aa, Glycine max
TVLLDGGGTFKDFIKQKSTDVMSIRKFGKLGDISSSLKTVNVNDYGARGDGKTDDTQAFKEAWEVACSSGGAVFVVPRKNYLLKPFTFSGPCESDIEVQISGIIEASENLSDYSEDLTHWLVFDSIEKLSVKGGGTIDGNGNIWWQNSCKVNEKLPCKNAPTALTFYKCKDLTVEDLTIKNGQQMQVSFQNSENVQVSDLTVTAPGDSPNTDGIHVTNTQNIQISNSVIGTGDDCISIVSGSKDVLATDIICGPGHGISIGSLGAEGSKDFVSGITVKGAQLSGTTNGLRIKTWQGGSGSASNIQFQNIQMDNVANPIIIDQNYCDQETPCEEQTSAVQIRNVLYQNISGTSASDVGVQFDCSKKFPCQGIVLQNIDLKLEGGGEAKASCNSVELSYRGDVNPLCP

SEQ ID NO: 604 - protein, 440 aa, Glycine max
MSPQTPTIPLFIVLASLVLCNGYYLEESFYKTNAKHYPVHDGRLIKTKHEHFGLITRANRASHLTSRPRGTVSVDDFGAKADGSDDSEAFGKAWNEACSRGAILVVPENRIYRLKPIIFSGPCRPNTAFMLYGTIEAWSQMSAYQEDRQHWIVFDSVSNFRVGGGGTFNGKGKKWWQSSCKVNTNLPCNDGPRPKAVTFYQCNNLKVTNLRFKDAPQMHVVFEGCFNVIVSNLVIRAPGDSPNTDGIHVADTQNIVISNSDIGTGDDCISIISGSQNVRATDITCGPGHGISIGSLGADNSEAEVSNVVVNRATLTGTTNGVRIKTWQGGSGYARNIKFLNIAMQNVTNPIIIDQYYCDQSKPCQEQDSAVQLSNVLYQNIKGTSASEVAIKFDCSRAVPCRQIYVQDVILEPQGHGGTIATCEHVSYVNRGKFFPQCTP

SEQ ID NO: 605 - protein, 428 aa, Glycine max
MALQRHHLSLLFIMFSFVACHSTVLFDDGSTFKDFIKQKSTDVLSLKKFVKLGDISSSLKTVNVNDYGARGDGKTDDTQAFNDAWEVACSSGGAVLLVPENNYLLKPFRFSGPCRSNIEVQISGTIEASENLSDYSEDLTHWLTFDSVEKLSVKGGGTIHGNGNIWWQNSCKVNEKLPCKDAPTALTFYKCNDLTVEDLTIKNGQKMQVSFQDSENVKVSGLTVTAPGDSPNTDGIHVTNTQNIQISSSVIGTGDDCISIVSGSKDVLATDIICGPGHGISIGSLGAGGSKDFVSGITVKGAMLSGTTNGLRIKTWQGGSGSASNIQFQNIQMDNVTNPIIIDQNYCDQETPCEEQKSAVQIRNVMYQNIKGTSASDVGVQFDCSNNFPCQGIVLQNIDLQLEGGGGAKASCNSVELSYRGDVIPLCP

SEQ ID NO: 606 - protein, 388 aa, Glycine max
MPENMSISVNGQSQVPPGFRFHPTEEELLQYYLRKKVSYEKIDLDVIRDVDLNKLEPWDIQEKCKIGTTPQNDWYFFSHKDKKYPTGTRTNRATAAGFWKATGRDKVIYSNGKRIGMRKTLVFYKGRAPHGQKSDWIMHEYRLDDNNTSDINIVSNVMGDAAQEEGWVVCRIFKKKNHLKTLDSPLASGEGRRSHMFDSCDEGALEQILQQMGRGCKEESSYEGNYNSYGRFAMGLNNGGGGGYNDRFMKLPSLESPKSASMENHHNTNNNCNNNMKSGGGLTNWAALDRLVASQLNGQTDASRQLGCAFNDPTMYCTSVDHHDLHHQIPTLRSSSTSANTRPSPAPAFINPPTQDFTSEIDLWNFSRSTSSLLASSEPLCHVSNTSV

SEQ ID NO: 607 - protein, 419 aa, Glycine max
MPENMSISVNGQSQVPPGFRFHPTEEELLQYYLRKKVSYEKIDLDVIRDVDLNKLEPWDIQEKCKIGTTPQNDWYFFSHKDKKYPTGTRTNRATAAGFWKATGRDKVIYSNGKRIGMRKTLVFYKGRAPHGQKSDWIMHEYRLDDNNTADTNIVSNVMGDAAQEEGWVVCRIFKKKNHLKTLDSPLASGEDRRSHLFDSCDEGALEQILEQMGRSCKEESSYEGNYRNYGRFTRPYETTGLNNGGGYNDRFMKLPSLESPKSASMESHHNTNNNNNMNSNNNNNGDNNENNNNNGYHPMIPVEMGTDNEGSFTTHQVSGGDPNNNNNNMVHPLEVGSGGGGLTNWAALDRLVASQLNGQTDASRQLACAFNDPTMYCTTFINPTTQDFTSEIDLWNFTRSTSSLLASSEPLCHVSNTSV

SEQ ID NO: 608 - protein, 104 aa, Glycine max
MEFPNEAIPEGCSQKKTGRGKIEIKRIENTTNRQVTFCKRRNGLLKKAYELSVLCDAEVALVVFSSRGRLYEYANNSVRGTIDRYKKACAASTNPESVSEANTQ

SEQ ID NO: 609 - protein, 150 aa, Glycine max
MSPTLVELDINTKPEINLTFKSICHNGGNSSVHEEISGATDHRDIPSLLQGRVGSSQGDGSTMISAVENKRESKPRSEGVLGVVNVRALCPTDLVGVKVVVQRDGVVENHYVSEVELARQFVCTFWGCHYCGRCIGCVASVVDDVVEEED

SEQ ID NO: 610 - protein, 393 aa, Oryza Sativa
MASTVLIVSASLLALFFFLHSADADVGSNVFSIQSYGAHGDGRHDDTKALGDTWAAACSSAKPAVLLIPKGKKYLIKHTTLSGPCKSSISLMVKGSLVASPERSDWSKETIRHWILISGVTGLTVTGGGTIDGNGKIWWQNSCKTNSKLPCTEAPTALTFYSCKNLKVEYLKVVNSQQIQISVEDCTDVMVSRLSITAPETAPNTDGIHITRSRDVEVTDCMIKTGDDCMSIEDGTENLHVKNMVCGPGHGISIGSLGDHNSEAHVNNVTVDNVRLYGTANGARIKTWQGGKGSAKNIVFQNMVMDNVWNPIIIDQNYCDSSTPCKQQKSAVEVSNVLFKNIRGTSASEEAIMLHCSSSVPCHGITLENVNLTVKGGIDLKHEHPWTLEDVEK

SEQ ID NO: 611 - protein, 447 aa, Oryza Sativa
MACNVLLFSAFVVVMSFFLCSVHAKVNMNASSLTNGDDSLRGKSSLESKKAVFDVRKHGSYGDGQHDDTKALSKAWAAACSSLQPSIVLVPKGKRYLTKHITLSGPCKSSITFMIEGTLVAPPKRSDWSKETIRHWIMFNGVIGLTVAGGGTVDGNGKIWWQNSCKTNAKLACTESPTALTFYSCSNLKVENLKLLNSQQIHMSVEDCTNVRISGLTITAPGTSPNTDGIHITRSKNVQVTGCTIKTGDDCMSIEDGTENLHVKNMVCGPGHGISIGSLGDHNSEAHVNNVTIGTVRLYGTTNGARIKTWQGGRGYAKYIVFQNMIMENVWNPVIIDQNYCDSATPCKKQLSICVNNMEAYNLVFLSQTSAVQISNVVFKNIRGTSASKEAIKLDCSRNVPCQGITLNDVKLTVKGGGGDAKSTCRNAKWKKSGTVVPQPCASTTTV

SEQ ID NO: 612 - protein, 438 aa, Oryza Sativa
MGPRKLHLASISALSIFLYVFAHTNSAQAFPVADGTYPPEAEGPAAESSDMDEQLELTPGPQPRVVDVDDYRARADAGDHTEAFLQAWKEACNSSDYPSVLLVPEGKTYLLMPVSFNGPCRATTITATIRGTLEAPSNRSVWLDRDLQEWITFDNIDHLRVLGGGTLNGNGHQWWINSCKTNRSMRCVTGPTALYFRRCNHLVVEGLQIRDSMQMHVVIAYSWRVLVSRLLITAPGWSPNTDGIHVSNSREVLMSGCIISTGDDCISIVTGSMFIRATGIFCGPGHGISIGSLGANKSWAHVSDVLVEKATLVGTTNGVRIKTWQGGDGHAERITFQDITMHNVTNPVIIDQNYCDSMTPCHEQGSAVAINNIRYRNIRGTSSSKVAINFVCSNSVHCDGIVMQDVSLVGEGSYVSCSYMNARVVELGYNFPYCRAEM

SEQ ID NO: 613 - protein, 422 aa, Oryza Sativa
MACNVLIFSAYVVVMSFFLCSVHAKVNMNASFHLTSGDDSLRGRSLESKKVVFDVRKHGAYGDGQHDDTKALAKAWAAACSSSQPSIVLIPKGKRYLTKHITLSGPCKSSITFMIEGTLVAPPKRSDWSKETIRHWIMFNGVSGLTVAGGGTVDENGKIWWQNSCKTNAKLPCTEAPTALTFYSCSNLKVENLKLLNSQQIHMSVEDCTDVRISSLTITAPGTSPNTDGIHITRSKNVQVTGCIIKTGDDCMSIEDGTENLHVKNMVCGPGHGISIGSLGDHNSEAHVNNVTVDTVRLYGTTNGARIKTWQGGWGYAKNIVFQNMIMENVWNPIIIDQNYCDSATPCKEQTSAVQVSNVVFKNIRGTSASKEAIKLDCSRNVPCQGITLKDVKLTIKGGGSDAKSTCGNAKWKKSGIALCFQ

SEQ ID NO: 614 - protein, 395 aa, Oryza Sativa
MSISVNGQSVVPPGFRFHPTEEELLTYYLKKKVASERIDLDVIRDVDLNKLEPWDIQERCRIGSGPQNDWYFFSHKDKKYPTGTRTNRATAAGFWKATGRDKAIYSSSNRIGMRKTLVFYKGRAPHGQKSDWIMHEYRLDDPSSASASVSVNLPSYYSSSSSSSSPMHGVAGDQGAQEEGWVICRVFKKKNLVHHGGGAAAASHHAAAKLAAAAMEGSPSNCSTVTVSDHVKAQMLHSSASDDALDHILQYMGRSGCKQETKPAAMSASSAAAAAALEQHLSTPQYGKFMKLPPLEHVAGGVGLLAAAGGGGEYCSAADASGIADWDTLDRLAASYELNGALSDVASGKNMAGFFDVVDQPAGAAAFSSGDGDLWSLARSVSSSLHADLTTMNNV

SEQ ID NO: 615 - protein, 400 aa, Oryza Sativa
MSISVNGQSCVPPGFRFHPTEEELLNYYLRKKVASEQIDLDVIRDVDLNKLEPWDIQERCKIGSGPQNDWYFFSHKDKKYPTGTRTNRATAAGFWKATGRDKAIYNAVHRIGMRKTLVFYKGRAPHGQKSDWIMHEYRLDDPATDTAAATPTVTSAAAAAAAMAAAADGGQEDGWVVCRVFKKKHHHKEAGGGGGKHGGDGSAGAKAAHAYSSSDDALDQILQYMGRSCKQEHELPSPQASGGGGAGAGSRPASRYLRPIDTVLGGHGFMKLPPLESPSAATALSSTPSTGGDAASSAAAAAADHLLLHHHHRTDWAMMDRLVASHLNGANSDAPDDQLCFDAADDDGLAYYSAAATRLLGGANAGTDDDLWSFARSAAPPPPPPPPSSATPERLSHVAL

SEQ ID NO: 616 - protein, 374 aa, Brassica napus
MSAAVIEGNDAVTGHIISTTIGGKNGEPKQTISYMAERVVGQGSFGIVFQAKCLETGESVAIKKVLQDRRYKNRELQLMRLMDHPNVVSLKHCFFSTTSRDELFLNLVMEYVPETLYRVLKHYTNSSQRMPIFYVKLYTYQIFRGLAYIHTVPGVCHRDVKPQNLLVDPLTHQCKLCDFGSAKVLVKGEANISYICSRYYRAPELIFGATEYTSSIDIWSAGCVLAELLLGQPLFPGENSVDQLVEIIKVLGTPTREEIRCMNPNYTDFRFPQIKAHPWHKVFHKRMPPEAIDLASRLLQYSPSLRYTALEACAHPFFNELREPNARLPNGRPLPALFNFKQELAGASPELINRLIPEHIRRQMSGGFPSQPGH

SEQ ID NO: 617 - protein, 271 aa, Brassica napus
MGVIEEAHNVKVIGSGNKGTVVLGHGFGTDQSVWKHLVPHLVDDYRIVLYDNMGAGTTNPEYFDFDRYSTLEGFAFDLLAILEDLQIESCIFVGHSLSAMVGVLASLNRPDLFSKIVMVSASPRFVNDVDYQGGFEQEDLNQLFEAIRSNYKAWCLGFAPLVVGGDLDSVAVQEFSRTLFNMRPDIALSMAQTIFSSDMRQILPFVSVPCHIVQSAKDLAVPVAVSEYLHTNLGSESVVEVMSSEGHLPQLSSPASVIPVLLRHIRQDITV

SEQ ID NO: 618 - protein, 471 aa, Brassica napus
MEDPTASNVTPPANSSSQIIIPSPSSVKVSLESRINRLINANQSPSPSRSIYSDRFIPSRSGSNFALFDLASPSPSKEDGAGSYATLLRAAMFGPETPEKRDITGFSTSRNIFRFKTETNRCLNSFSPFVSDDGPGVSHAPIKALRKVSRSPYKVLDAPALQDDFYLNLVDWSAQNVLAVGLGNCVYLWNACSSKVTKLCDLGADDSVCSVGWAFRGTHLAVGTSSGKVQIWDASRCKRTRTMEGHRLRVGALAWGSSVLSSGSRDKSILQRDIRCQEDHVSKLAGHKSEVCGLKWSYDNRELASGGNDNRLFVWNQHSTQPVLKYSEHTAAVKAIAWSPHVHGLLASGGGTADRCIRFWNTTTNTHLSSIDTCSQVCNLAWSKNVNELVSTHGYSQNQIIVWKYPTMSKIATLTGHTYRVLYLAVSPDGQTIVTGAGDETLRFWNVFPSPKSQNTDSDIGSSFFGRTTIR

SEQ ID NO: 619 - protein, 574 aa, Brassica napus
MITATDFYHVMTAMVPLYVAMILAYGSVKWWKIFTPTQCSGINRFVALFAVPLLSFHFIAANNPYAMNLRFLAADSLQKVIVLSLLFLWCKLSPNGSLDWTITLFSLTTLPNTLVMGIPLLKGMYGDFSGDLMVQIVVLQCIIWYTLMLFLFEYRGAKLLISEQFPDTAGSIVSIHVDSDIMSLDGRQPLETEAEIKEDGKLHVTVRRSNASRSDIYSRRSQGLSATPRPSNLTNAEIYSLQSSRNPTPRGSSFNHTDFYSMMAAGGGRNSNFGPGEAVFGSKGPTPRPSNYEEDGGAKPAAGAGRFPYHGGGGAAAKGNDGNGRDLHMFVWSSSASPVSDVFGGGVNHHSDYAAATNEQHKDGNSNDSQYVEREDFSFGNKDDDSKVLATDNNISNKAQQQQPKVMPPTSVMTRLILIMVWRKLIRNPNSYSSLFGITWSLISFKWNIEMPAIIAKSISILSDAGLGMAMFSLGLFMALNPRIIACGNRRAAFAAGMRFLAGPAVMTVASYAVGLRGVLLRVAIIQAALPQGIVPFVFAKEYNVHPDILSTAVIFGMLIALPITLLYYILVGL

SEQ ID NO: 620 - protein, 446 aa, Brassica napus
METNMFINNPSAHLPFSYTFTSSSNSSTTTSTTTDSTSGQWMDSRIWSKLPPSLLDRIIAFLPPPAFFRSRCVCKRFYGLLFSNTFLEIYLQLLPPRHNCFLFFKHKTLKSYIYKRGGGGGANDDGSNKAEGFLFDPNEIRWYRLSFPYIPSGFYPSGSSGGLVSWVSEEAGLKTILLCNPLVGSVSQLPPMSRPRLFPSIGLSVTPTSIDVTVAGDDLISPYAVKNLSSESFHVDAGGFFSLWAMASSLPRLCSLESGKMVYVGGKFYCMNYSPFSVLCYEVTGNRWIKIQAPMRRFLRSPSLLESKGRLVLVAAVEKSKLNVPKSLRLWSLQQDNATWVEIERMPQPLYTQFAVEEGGKGFECVGNQEFVMIVLRRASLQLLFDMVRKSWLWVPPCPYSGGSSSGVGSGGSEGEVLQGFAYDPVLTTPVVSLLDQLALPFPGAC

SEQ ID NO: 621 - protein, 411 aa, Brassica napus
MDPEGFTSGLFRWNPTRVMVQAPTPIPPPQQQSPATPQTAAFGMRLGGLEGLFGPYGVRFYTAAKIAELGFTASTLVGMKDEELEDMMNSLSHIFRWELLVGERYGIKAAVRAERRRLQEEEEEESSRRRHLLLSAAGDSGTHLALDALSQEGLSQEPVQHQDQTDAAGINGGGRGGYWEAGQTTIKKQQQRRRKKAIVTSVETDDDGNEGEDDDGMDIVNGSGSGMERQREHPFIVTEPGEVARGKKNGLDYLFHLYEQCREFLLQVQTIAKDRGEKCPTKVTNQVFRYAKKSGANYINKPKMRHYVHCYALHCLDEEASNALRRAFKERGENVGSWRQACYKPLVDIACRHGWDIDAVFNAHPRLSIWYVPTKLRQLCHLERNNAVAAAATLVGGISCEGSPASGRFGV

SEQ ID NO: 622 - protein, 1120 aa, Brassica napus
MSSLSRELVFLILQFLDEEKFKETVHKLEQESGFFFSMKYFEDEVHSGNWDEVEKYLSGFTKVDDNRYSMKIFFEIRKQKYLEALDKHDRPKAVEILVKDLRVFSTFNEELFKEITQLLTLENFRENEQLSKYGDTKSARSIMLVELKKLIEANPLFRDKLQFPTLRNSRLRTLINQSLNWQHQLCKNPRPNPDIKTLFVDHSCRLPNDARAPSPVNNPLLGSLPKAGGFPPLGAHGPFQPTPSQVPTPLAGWMSSSSSVPHPAVSGGAIALGSPSIQAALKHPRTPPSNSAVDYPSGDSEHVSKRTRPMGISDEVNLGVNMLPMTFPGQAHGHTQAFKAPDDLPKTVARTLSQGSSPMSMDFHPIKQTLLLVGTNVGDIGLWEVGSRERLVQKTFKVWDLSKCSMPLQAALVKEPVVSVNRVIWSPDGSLFGVAYSRHIVQLYSYHGGEDMRQHLEIDAHVGGVNDIAFSTPNKQLCFTTCGDDKTIKVWDAATGVKRHTFEGHEAPVYSICPHYKENIQFIFSTALDGKIKAWLYDNMGSRVDYEAPGRWCTTMAYSADGTRLFSCGTSKDGDSYIVEWNESEGAVKRTYQGFHKRSLGVVQFDTTKNRYLAAGDDFSIKFWDMDNVQLLTAIDADGGLQASPRIRFNKEGSLLAVSANDNMIKVMANTDGLRLLHTVDNLSSESSKPAINNIAVAERAAERPASVVSIPGMNGDSRNMADVKPVITEESNDKSKIWKLTEVGEPSQCRSLRLPENMRVTKISRLIFTNSGNAILALASNAIHLLWKWQRNDRNATGKATASLPPQQWQPASGILMTNDVTEANSEEAIPCFALSKNDSYVMSASGGKISLFNMMTFKTMATFMPPPPAATFLAFHPQDNNIIAIGMDDSTIQIYNVRVDEVKSKLKGHSKRITGLAFSNVLNVLVSSGADAQLCVWNTDGWEKQRSKVLQVPQGRSTGALSDTRVQFHQDQVHFLVVHETQLAIYETTKLECMKQWPVRESSAPITHATFSCDSQLIYASFMDATICVFTSANLRLRSRVNPSAYLPASLSNSNVHPLVIAAHPQESNMFAVGLSDGGVHIFEPLESEGKWGVAPPPENGSSSALASTPSASDQPQR

SEQ ID NO: 623 - protein, 402 aa, Oryza Sativa
MDQPAPAPEPMLLDAQPPAAVACDKKQQEGEAPYAEGNDAVTGHIISTTIGGKNGEPKRTISYMAERVVGTGSFGIVFQAKCLETGETVAIKKVLQDRRYKNRELQLMRAMDHPNVISLKHCFFSTTSRDELFLNLVMEYVPETLYRVLKHYSNANHRMPLIYVKLYMYQLFRGLAYIHTVPGVCHRDVKPQNVLVDPLTHQVKLCDFGSAKTLVPGEPNISYICSRYYRAPELIFGATEYTTSIDIWSAGCVLAELLLGQPLFPGESAVDQLVEIIKVLGTPTREEIRCMNPNYTEFRFPQIKAHPWHKVFHKRMPPEAIDLASRLLQYSPSLRCTALDACAHPFFDELREPNARLPNGRPFPPLFNFKHELANSSQELISRLIPEHVRRQATHNFFNTGS

SEQ ID NO: 624 - protein, 401 aa, Oryza Sativa
MATLPGGPHPTGGGAAADPMQVDQPRSAAAAAAVAPAGEKHGASLMEGSDPVTGHIISTTIGGKNGEPKRTISYMAERVVGTGSFGIVFQAKCLETGETVAIKKVLQDKRYKNRELQIMRSMDHCNVVSLKHCFFSTTSRDELFLNLVMEFVPESLYRVLKHYSNMNQRMPLIYVKLYVYQIFRGLAYIHTVPGVCHRDVKPQNLLVDPLTHQVKICDFGSAKMLVKGEANISYICSRYYRAPELIFGATEYTTSIDIWSAGCVLAELLLGQPLFPGESAVDQLVEIIKVLGTPTREEIRCMNPNYTEFRFPQIKAHPWHKIFHKRMPPEAIDLASRLLQYAPNLRCTALEACAHSFFDELREPHARLPNGRPFPPLFNFKQELANLSPELINRLIPEHAR

SEQ ID NO: 625 - protein, 403 aa, Oryza Sativa
MAAMPGGPDLAGAGGAVAVAVDAMQVDDPPRASAEEKHGPTIMGGNDPVTGHIISTTIGGKNDEPKRTISYMAERVVGTGSFGVVFQAKCLETGETVAIKKVLQDKRYKNRELQIMRSMDHCNVISLKHCFFSTTSRDELFLNLVMEFVPESLYRVLKHYKDMKQRMPLIYVKLYMYQIFRGLAYIHTVPGVCHRDIKPQNILVDPLTHQVKVCDFGSAKMLIKGEANISYICSRYYRAPELIFGATEYTTSIDIWSAGCVLAELLLGQPLFPGESAVDQLVEIIKVLGTPTREEIRCMNPNYTEFKFPQIKACPWHKIFHKRMPPEAIDLVSRLLQYSPNLRCTALEACAHSFFDELREPHAKLPNGRPFPPLFNFKQELANTHPELVSRLLPEHAQRHSGF

SEQ ID NO: 626 - protein, 424 aa, Oryza Sativa
MAYSGLRHGGVGSSSRPGHGFKGPASSVECLGREMLEMQLRDSKPDVGDEKNTERDVVDGSSAEAGHIIATTIRGRNGLPKQSVTYIAEHVVGTGSFGVVYQAKCRETGEIVAIKKVLQDKRYKNRELQIMHMLDHPNIVGLKHYFFSTTERDELYLNLVLEYVPETVNRIARQYSRMNQRVPLIYVKLYTYQICRALAYIHNCVGICHRDIKPQNVLVNPHTHQLKICDFGSAKVLVKGEPNISYICSRYYRAPELIFGATEYTTAIDLWSTGCVMAELLLGQPLFPGESGVDQLVEIIKVLGTPTREEIKCMNPNYTEFKFPQIKAHPWHKVFQKRLPPEAVDLVSRFLQYSPNLRCTAMEACMHPFFDELRDPNTRLPNGRPLPPLFNFRTQELNGIPPEAIERLVPEHARRQSLFMALRT

SEQ ID NO: 627 - protein, 336 aa, Oryza Sativa
MAERIVGQGSFGIVFQAKCLETGETVAIKKVLQDKRYKNRELQTMRLLDHPNVVALKHCFFSTTEKDELYLNLVLEYVPETVHRVVKHYNKMNQRMPLIYVKLYMYQICRALAYIHNSIGVCHRDIKPQNLLVNPHTHQLKLCDFGSAKVLVKGEPNISYICSRYYRAPELIFGATEYTTAIDIWSAGCVLAELMLGQPLFPGESGVDQLVEIIKVLGTPTREEIKCMNPNYTEFKFPQIKAHPWHKVFHKRLPPEAVDLVSRLLQYSPNLRCTAVEALVHPFFDELRDPNARLPNGRFLPPLFNFKPHELKGIPSDIMAKLIPEHVKKQCSYAGV

SEQ ID NO: 628 - protein, 379 aa, Oryza Sativa
MASVGVVRSSLGFQNETSTSGDADRLPNEMSNMSIRDDNKDIDDIVVNGNGTEPGHVIVTSIDGRNGQAKQTISYMAERVVGHGSFGTVFQAKCLETGETVAIKKVLQDKRYKNRELQTMRVLDHPNVVSLKHCFFSKTEKEELYLNLVLEYVPETAHRVIKHYNKMNQRMPLIYAKLYMYQICRALAYIHNTIGVCHRDIKPQNLLVNPHTHQLKLCDFGSAKVLVKGEPNISYICSRYYRAPELIFGATEYTTAIDVWSAGCVLAELLLGQPLFPGDSGVDQLVEIIKVLGTPTREEIKCMNPNYTEFKFPQIKAHPWHKIFHKRMPAEAVDLVSRLLQYSPYLRSTAVSVVVALFEPTPFFRESFSSWHHYCVTFF

SEQ ID NO: 629 - protein, 322 aa, Oryza Sativa
MLRSTHPPPSSPSSSSSGGGGGGGSSASSSSEKTMVGGGGGGGGGSGSAAPSGAKLLQILNVRVVGSGERVVVLSHGFGTDQSAWSRVLPYLTRDHRVVLYDLVCAGSVNPDHFDFRRYDNLDAYVDDLLAILDALRIPRCAFVGHSVSAMIGILASIRRPDLFAKLVLIGASPRFLNDSDYHGGFELEEIQQVFDAMGANYSAWATGYAPLAVGADVPAAVQEFSRTLFNMRPDISLHVCQTVFKTDLRGVLGMVRAPCVVVQTTRDVSVPASVAAYLKAHLGGRTTVEFLQTEGHLPHLSAPSLLAQVLRRALARRCGQS

SEQ ID NO: 630 - protein, 417 aa, Oryza Sativa
MEMASGGGAAAAAGGGVGGSGGGGGGGDEHRQLHGLKFGKKIYFEDAAAAAGGGGTGSGSGSASAAPPSSSSKAAGGGRGGGGKNKGKGVAAAAPPPPPPPPRCQVEGCGADLSGIKNYYCRHKVCFMHSKAPRVVVAGLEQRFCQQCSRFHLLPEFDQGKRSCRRRLAGHNERRRRPQTPLASRYGRLAASVGEHRRFRSFTLDFSYPRVPSSVRNAWPAIQPGDRISGGIQWHRNVAPHGHSSAVAGYGANTYSGQGSSSSGPPVFAGPNLPPGGCLAGVGAATDSSCALSLLSTQPWDTTTHSAAASHNQAAAMSTTTSFDGNPVAPSAMAGSYMAPSPWTGSRGHEGGGRSVAHQLPHEVSLDEVHPGPSHHAHFSGELELALQGNGPAPAPRIDPGSGSTFDQTSNTMDWSL

SEQ ID NO: 631 - protein, 523 aa, Oryza Sativa
MDHHHHHLPPPPPRSPMENSASSKPPTPASTPSSRLAAAPSSRVSSAAPHPSPSSSAPTPASRTVYSDRFIPSRAGSNLALFDLAPSPSHHDAAAAAASPGAPPPSGSTPASSPYCALLRAALFGPTTPDRVASSASACSSSSSAGASPVGSPATGNIFRFKAEVPRNAKRALFSDGDDEGVLFPGVFTTRGTGPRKIPRSPYKVLDAPALQDDFYLNLVDWSSHNILAVGLGNCVYLWNACSSKVTKLCDLGVDDNVCSVGWAQRGTHLAVGTNQGKVQVWDATRCKRIRTMESHRMRVGALAWNSSLLSSGSRDKSILHHDIRAQDDYISRLAGHKSEVCGLKWSYDNRQLASGGNDNRLYVWNQHSAHPVLKYTEHTAAVKAIAWSPHLHGLLASGGGTADRCIRFWNTTTNMHLNCVDTGSQVCNLVWSKNVNELVSTHGYSQNQIIVWRYPTMSKLATLTGHTYRVLYLAISPDGQTIVTGAGDETLRFWNVFPSPKSQSSDSLSSIGATSFVRSYIR

SEQ ID NO: 632 - protein, 677 aa, Oryza Sativa
MSAAGYRYQALKEALAAAISGHDLARHHAAADHRRPHALAVVAGLASNGYVASLLVSRYFRLGDAGAARNVFDAAATAAAPQKALLYNAMLRGYLAGGLPRMAVGIFGEMAAAACLPDRHTYHLAVAACARASEFEVGWRIGAEAAAKGFASDLLVATALIGMYAEAGDMGAARKVFDGMPQRDAVAWNAVIAGYARGGHLREVVELFMRMRSVDVVLPTEATLVTLVSGYAGFGSWEGRGMMHTIVIKLGFQLNLFVSNALLDLYVEFGCLREAVMLFRQMAVKDSVTWSAMIGGLVRNGRPDSALKLFRWMVTNSTVLVTRSILLNVIMACAELGEWREGKWVEENYVCCNGFEFKRDPSVVTALIYMYAKCGMLDSSVSLLYGVAEVRDDVFAWNAMIKGCGELGLVEKAVGFVVEMQKIGVDPDAITYLEILPMISSIPSLKTGMEAHAQIVRRGFLNERAIANSLVSMYGRCGSLRHSIEVFSRIVVKDVISWTSMMQVYAWNGHVNEVVKLYEVMKKTETEPNHYTFLAVLSACKNTGLVEEGMELIKYMQEKCGLKPEIEHISCVVDMLCRAGRLTDAYHLIKYNNSEHINNTILWGTLLSASRSCGDLVIGEAAAKHLLSLDPENRANSKMLADIYVLLGRRDDADNLLRVSMTRGLDIKPGCSWMEGV

SEQ ID NO: 633 - protein, 407 aa, Oryza Sativa
MDPRVWRRLPQPLVDRILACLPTPSFLRLRAACRRFYHLLFSSPFLHSHLLLSPHLPFFAFVVPAAGHLLLLDPTATASWSRLPLPLPPVAGGPAAFSPAAASAGLLAFLSDASGHKTLLLANPITRLLAALPISPTPRLSPTVGLAAGPTSIIAVVAGDDLVSPFAVKNISADTFVADAASVPPSGFWAPSSLLPRLSSLDPRAGMAFASGRFYCMSSSPFAVLVFDVAENVWSKVQPPMRRFLRSPALVELGGGREGAARVALVSAVEKSRLSVPRSVRLWTLRGGGGGGGGGAWTEVARMPPEVHAQFAAAEGGRGFECAAHGDYVVLAPRGPVAQAPTSALVFDSRRDEWRWAPPCPYVVVAHHGGAGAAGFRVFAYEPRLATPAIGLLDATAPVALHGMHDG

SEQ ID NO: 634 - protein, 389 aa, Oryza Sativa
MDPNDAFSAAHPFRWDLGPPAPAPVPPPPPPPPPPPPANVPRELEELVAGYGVRMSTVARISELGFTASTLLAMTERELDDMMAALAGLFRWDLLLGERFGLRAALRAERGRLMSLGGRHHGHQSGSTVDGASQEVLSDEHDMAGSGGMGDDDNGRRMVTGKKQAKKGSAARKGKKARRKKVDDLRLDMQEDEMDCCDEDGGGGSESTESSAGGGGGERQREHPFVVTEPGEVARAKKNGLDYLFHLYEQCRLFLLQVQSMAKLHGHKSPTKVTNQVFRYAKKVGASYINKPKMRHYVHCYALHCLDEEASDALRRAYKARGENVGAWRQACYAPLVDISARHGFDIDAVFAAHPRLAIWYVPTRLRQLCHQARSSHAAAAAALPPPLF

SEQ ID NO: 635 - protein, 1133 aa, Oryza Sativa
MSSLSRELVFLILQFLDEEKFKETVHKLEQESAFYFNMKHFEDLVQGGEWDEVEKYLSGFTKVEDNRYSMKIFFEIRKQKYLEALDRHDRAKAVEILVKDLKVFASFNEELFKEITQLLTLENFRQNEQLSKYGDTKSARNIMLMELKKLIEANPLFRDKLNFPPFKVSRLRTLINQSLNWQHQLCKNPRPNPDIKTLFTDHSCAAPTNGARAPPPANGPLVGPIPKSAAFPPMGAHAPFQPVVSPSPNAIAGWMTNANPSLPHAAVAQGPPGLVQPPNTAAFLKHPRTPTSAPAIDYQSADSEHLMKRMRVGQPDEVSFSGASHPANIYTQDDLPKQVVRNLNQGSNVMSLDFHPVQQTILLVGTNVGDIGIWEVGSRERIAHKTFKVWDISSCTLPLQAALMKDAAISVNRCLWSPDGSILGVAFSKHIVQTYAFVLNGELRQQAEIDAHIGGVNDIAFSHPNKTLSIITCGDDKLIKVWDAQTGQKQYTFEGHEAPVYSVCPHYKESIQFIFSTAIDGKIKAWLYDCLGSRVDYDAPGHWCTTMAYSADGTRLFSCGTSKDGDSHLVEWNETEGAIKRTYNGFRKRSLGVVQFDTTRNRFLAAGDEFVVKFWDMDNTNILTTTDCDGGLPASPRLRFNREGSLLAVTANENGIKILANTDGQRLLRMLESRAYEGSRGPPQQINTKPPIVNTLGSVSNVSSPMAVNSERPDRALPTVSMSGLAPMDVSRTPDVKPRITDESEKVKTWKLADIGDSGHLRALRMPDTSATSSKVVRLLYTNNGVALLALGSNAVHKLWKWQRTDRNPNGKSTASFTPQMWQPANGILMANDTSDGNPEEATACIALSKNDSYVMSASGGKVSLFNMMTFKVMTTFMAPPPAATFLAFHPQDNNIIAIGMEDSTIQIYNVRVDEVKSKLKGHSKKITGLAFSQSMNMLVSSGADAQLCAWSIDGWEKKKSRYIQSPANRSGALVGDTRVQFHNDQTHILVVHESQLAIYDAKLECLRSWSPREALPAPISSAIYSCDGLLIYAGFCDGAIGVFEAESLRLRCRIAPSAYIPPSMSSGGSVYPMVVAAHPLEPNQIAVGMSDGAVHVVEPLDSDPKWGVAPPQDNGTHPTISAAPAAANKPEV

SEQ ID NO: 636 - protein, 215 aa, Oryza Sativa
MHDPRGFPIHPQPYHLHPTAGGLGEGRMRGGGRRRPGAKLSTDPQSVAARERRHRISDRFRVLRSLVPGGSKMDTVSMLEQAIHYVKFLKAQVTLHQAALVQHEEGCQHADVAAAFSAADADLALELNHRHGGAGDDDAGMTTLEMAPMQEAVGYGDGPAHQMMQQALDPAGQLMMGGAHQLPPLPCCVFVQETDPSCYSVCNVHGEESGAQGSY

SEQ ID NO: 637 - protein, 324 aa, Oryza Sativa
MAQEPINHHQHQHDPPKQPPPREADDDHHRIQEREPLPPPTTTTRNQRLQLQLGGDGHHNHHHHHHQEVAGTSGSSSGGSSSNNGGGGTRDWLRLATGPASPGASAGSDHDLFPSTTTTAPAPQPPTPTPTPTPTPTPRHHHHDVLVLPGMPPPGSFLRPGPAMPGIPQASIPTHMLRAAPPWLPPWSPVAAPPPLLPFPHQHRAFYAAPPTTTPPASSGFDAIRVVLPPSAVAAAAGVWFVLQAAPLQGREPFLPQIPRSYLRIKDGRVTVRLLTKYLVNKLGLEDESEVRGVCLGWHISPPSPLDKSFSIHAIPFHSIPSIL

SEQ ID NO: 638 - protein, 183 aa, Oryza Sativa
MELELGLRLALPSPSPSPATATAAGSELDLLNSAPGSCRKRGFEEALGGFKTDDDNDDGNGRGGDGDSDGEMGNKRRKLVGWPPVKCLHRRRDGGCGGGYVKVKMEGLAIGRKLDLSILGSYAELLDTLHLMFPSTNQEDGHDRRRRHPYAVTYEDGEGDWMQVGDVPWEAFAKSVKRLKILV

SEQ ID NO: 639 - protein, 175 aa, Brassica napus
MSLSNRDPLVVGRVVGDVLECFTRSIDLRVTYGQREVTNGLDLRPSQVLNKPRVEIGGEDLRNFYTLVMVDPDVPSPSNPHLREYLHWLVTDIPATTGTNFGNEIVSYESPRPNSGIHRIVLVLFRQLGRQTVYEPGWRQQFNTREFASLYNLGLPVAAVFYNCQRESGCGGRRS

SEQ ID NO: 640 - protein, 202 aa, Brassica napus
MSLSPRDPLVLARVVGDVVDPFMRLISLTVNYGQRQVTNGLDLRTSQVLNKPTVEIGGDDLRNFYTLLRDVFRVSCMHNCFGVLVIFPEIFLIIMLWCPDVPSPSNPHLREYLHWLVTDIPATTGTAFGNELVHYENPCPNSGIHRVALMLSRQLRRQTVYAPEWRQRFNTRAFAENNNLGLPVAAVFFNCQRDNGCGGRRT

SEQ ID NO: 641 - protein, 882 aa, Brassica napus
MESQDSDEPMQKKPHLLDSVSPTATAPNSSPSHPVAKSVDATVLQLQNQKLVQQLDLQKKRMYDVETKIHELHLNQSSYDDQLISVNRLWNQLVDDLVLLGVRAGANQEALKYLDIADKKRGSVPPCAADEMFLCRLLEVDSIGSSNSDEVVRKVEEALSLRHSSTVELMGVFENTIATQRTKAESISQNLQAVKSAEDATVQLSNINDLMKEEARNLREMIDALNARHKEQTEQIQAYVCSHSTDQSELKHLKGELEEIKAELEENRRKLINLKMQKDAACEGHVTSSPAVANGSVSPEKPVDKTKLRELKDSIDEIKIVAEGRLSELQAAQEYNLSLSRQCEDIENELKDDQYIYSSRLYNLIKEQLHHWNDDVDRYKLLSEAAQAERSFVMRREKDLNQREESLEAAKQKITSVGSRIEVLEQKLQSCIVEKNGLELETEEAIQDSERQDIKREFITMASTLSKEMEMMEAQLKRWKNTAHDALDLRQQAQSLRVSLSNKADEQKGLENKCAEQMAEIKSLKALIEKLLKEKLELQNLASIYTRECNDERGLAEIKESQRKAQAQAEELKNVLDEHFLELRVKAANETETACQERLATAKAEIAELRTQLDVSEREVLELKEGIKVKEQEAEALIAEMETVGQAYEDMQTQNQHLLQQVAERDDYNIKLVSESVKTKHAYNTHLSEKQVMEKQLQNVNASVETLKARIAHSEEQMKGCFAEAYKLIQEDRHLVLSLETAKGELADAEKEFRWIKSAVSSSEKEYEQISRRTDEIKLELDDERSEKKKLEEELMELNKELEELGSESVEAATLRLQEEVKNCKNILKCGVCFDRPKEVVIMKCFHLFCKQCIQRSLEIRHRKCPGCGTAFGQSDVRVVKM

SEQ ID NO: 642 - protein, 701 aa, Brassica napus
MNVNEEGEGSRYPVTDQKPVETKERLSGEDKANGIVMDVRNGSAVGSGGLQIPISQQTPATVCWERFLHVRTIRVLLVENDDCTRYIVTALLRNCSYEVVEVANGVQAWKVLEDLNNHIDIVLTEVVMPYLSGIGLLCKILNHKSRRNIPVIMMSSHDSMGLVFKCLSKGAVDFLVKPIRKNELKILWQHVWRRCQSSSGSGSESGTHQTQKSVKSKNVIKSDNDSGRSGENENESDGLNASDGSSDGSGAQSSWTKKAVEVDDDSPRAVSPWDRVDSTCAQVVHSNPEVPGNHLIAAPAEKETQEQDEKFEDITMGRDLEISIHGNCDLTLEPKDEPLTKSTGVGKGPLDLNSESRSSKQMHEDGGSGFKAISSHLQDNREHEAPNTHCKTVDTNEAAIKNPEEPMHVEHSSKRHRGAKDDETIVRDDRNVLRRSEGSAFSRYNPALNNSKLSGGNLGSNSRHDNNCQDLNKRTEAACDCHSNMNESLPSNHHSRVGSNNVEMSSTTVNNAFTKPGAPKVSPAGSSSAKRSLFQPLPCDHHHSSHNLVHVPERKLPPQYGSSNVYNETVEGNNNNTVNYSVNGSGSGSGHGSNDPYGSSNGMNAGGLNMGSENGAGKSGSGDGSGSGSGSGNVADENKISQREAALTKFRQKRKERCFRKKVRYQSRKKLAEQRPRVRGQFVRKTAAATDDNDIKTPRDS

SEQ ID NO: 643 - protein, 186 aa, Brassica napus
MADSDNDSGGHKDGGSASSREQDRFLPIANVSRIMKKALPANAKISKDAKETVQECVSEFISFVTGEASDKCQREKRKTINGDDLLWAMTTLGFEDYVEPLKVYLQKYREVEGERTTTGKQVDKEGGAGGNGNSSGGGGGGYNGGGRATAGGGMYGGIVTMGNHHQGHVYGGGMHHTQQSGSARAD

SEQ ID NO: 644 - protein, 179 aa, Oryza Sativa
MAGSGRDRDPLVVGRVVGDVLDAFVRSTNLKVTYGSKTVSNGCELKPSMVTHQPRVEVGGNDMRTFYTLVMVDPDAPSPSDPNLREYLHWLVTDIPGTTAASFGQEVMCYESPRPTMGIHRLVFVLFQQLGRQTVYAPGWRQNFNTKDFAELYNLGSPVAAVYFNCQREAGSGGRRVYP

SEQ ID NO: 645 - protein, 178 aa, Oryza Sativa
MAGSGRDDPLVVGRIVGDVLDPFVRITNLSVSYGARIVSNGCELKPSMVTQQPRVVVGGNDMRTFYTLVMVDPDAPSPSNPNLREYLHWLVTDIPGTTGATFGQEVMCYESPRPTMGIHRLVFVLFQQLGRQTVYAPGWRQNFSTRNFAELYNLGSPVATVYFNCQREAGSGGRRVYP

SEQ ID NO: 646 - protein, 844 aa, Oryza Sativa
MDAAALQYENQKLVQQLEAQKSKMRALEGKFKELRDEQCSYDNTLICLNKMWNQLIDDLVLLGVRAGGDLNGLQALDHEEMSEESLESCPSEEIFLFRLLNSRNFRNNDDSSLSKLVEEALALRYSTTVTLMKSLQEAFAVQQARSESLSLALNGQNSSEDVIVALENHNDYLKEVVDNLRQAVSIINRKHEKYLDEIEAFKNNQSRELHEVKCLSGELEESMAELEESRRKLAVLQLQTGGGSLMNTSAPNGVNGSVSTDKSSDKGMGWRDLKDAVEEAKTLAANRLFELHETQEDNLILSKQLEDIQDQLKDENYIVTSKPYTILSDQLHHLNAEIERYRGLVEVLQNEKDQLMQKEEEMLAKAESVDAVQQSITTYKAKIEDLEHEIQKLMAEKNDLEIKAEEALQDSGKKDFKDEIHVMAASLSKEMELLDNQMNRSKDAASEALALREEADYLRTLLAKKIDEQKEISDRYNTQVTEIKSLKALIETLDQEKQELQFIVDMLGKECSESRAISEIEESENRARKQAEYLRKCLEEHNLELRVKAANEAETACQQRLSIAEAELEDLRAKVDASERDVMKLKESIRIKEAEVDGHISEIETIGQAYEDMQTQNQHLLQQVADRDDFNIKLVSDSVKMKQAYGSLLAEKNMLQKQLQHVNSSLESSKLKITSGEEQMKTYVAQAMKSSSENRHLAISLERTMLEVSDAEKELKWLRSATGSAEKEYEINQKKIAELKMELERERNERIKLEEEYEEVKNEVSELTSETEETTIQKLQDEIKECKAILKCGVCFDRPKEVVITKCFHLFCSPCIQRNLEIRHRKCPGCGTPFGQSDVREVKI

SEQ ID NO: 647 - protein, 287 aa, Oryza Sativa
MGMANEESPNYQVKKGGRIPPPRSSLIYPFMSMGPAAGEGCGLCGADGGGCCSRHRHDDDGFPFVFPPSACQGIGAPAPPVHEFQFFGNDGGGDDGESVAWLFDDYPPPSPVAAAAGMHHRQPPYDGVVAPPSLFRRNTGAGGLTFDVSLGERPDLDAGLGLGGGGGRHAEAAASATIMSYCGSTFTDAASSMPKEMVAAMADDGESLNPNTVVGAMVEREAKLMRYKEKRKKRCYEKQIRYASRKAYAEMRPRVRGRFAKEPDQEAVAPPSTYVDPSRLELGQWFR

SEQ ID NO: 648 - protein, 742 aa, Oryza Sativa
MMGTAHHNQTAGSALGVGVGDANDAVPGAGGGGYSDPDGGPISGVQRPPQVCWERFIQKKTIKVLLVDSDDSTRQVVSALLRHCMYEVIPAENGQQAWTYLEDMQNSIDLVLTEVVMPGVSGISLLSRIMNHNICKNIPVIMMSSNDAMGTVFKCLSKGAVDFLVKPIRKNELKNLWQHVWRRCHSSSGSGSESGIQTQKCAKSKSGDESNNNNGSNDDDDDDGVIMGLNARDGSDNGSGTQAQSSWTKRAVEIDSPQAMSPDQLADPPDSTCAQVIHLKSDICSNRWLPCTSNKNSKKQKETNDDFKGKDLEIGSPRNLNTAYQSSPNERSIKPTDRRNEYPLQNNSKEAAMENLEESSVRAADLIGSMAKNMDAQQAARAANAPNCSSKVPEGKDKNRDNIMPSLELSLKRSRSTGDGANAIQEEQRNVLRRSDLSAFTRYHTPVASNQGGTGFMGSCSLHDNSSEAMKTDSAYNMKSNSDAAPIKQGSNGSSNNNDMGSTTKNVVTKPSTNKERVMSPSAVKANGHTSAFHPAQHWTSPANTTGKEKTDEVANNAAKRAQPGEVQSNLVQHPRPILHYVHFDVSRENGGSGAPQCGSSNVFDPPVEGHAANYGVNGSNSGSNNGSNGQNGSTTAVNAERPNMEIANGTINKSGPGGGNGSGSGSGNDMYLKRFTQREHRVAAVIKFRQKRKERNFGKKVRYQSRKRLAEQRPRVRGQFVRQAVQDQQQQGGGREAAADR

SEQ ID NO: 649 - protein, 297 aa, Oryza Sativa
MKSRKSYGHLLSPVGSPPLDNESGEAAAAAAAGGGGCGSSAGYVVYGGGGGGDSPAKEQDRFLPIANVSRIMKRSLPANAKISKESKETVQECVSEFISFVTGEASDKCQREKRKTINGDDLLWAMTTLGFEAYVGPLKSYLNRYREAEGEKADVLGGAGGAAAARHGEGGCCGGGGGGADGVVIDGHYPLAGGLSHSHHGHQQQDGGGDVGLMMGGGDAGVGYNAGAGSTTTAFYAPAATAASGNKAYCGGDGSRVMEFEGIGGEEESGGGGGGGERGFAGHLHGVQWFRLKRNTN

SEQ ID NO: 650 - protein, 589 aa, Brassica napus
MDDHHPQYGVPELRQLMQGRTTTTESPSTSSHFPSDFFGFNLAPAAPPPPPQHHRLHQFTTDQEMGFLPRGIHGLGGSSSTAGNNSNLNASSSGGAVGFSGFLDGGGIGGGGGGDGGGTGRWPRQETLTLLEIRSRLDHKFKEANQKGPLWDEVSRIMSEEHGYQRSGKKCREKFENLYKYYKKTREGKAGRQDGKHYRFFRQLEALYGDSNNLVPCPSHNTQFMSNALHGFHTQNAMNDVTTTTSNIHNVDSVHGFHRQSLSLSNNYNSSELELVTSSSEGNDSSSRRKKRSWKNKIKEFIDVNMKRLMERQDVWLEKLTKVIEDKEEQRMMKEEEWRKSEAARIDKEHLFWSKERERMEARDVAVIEALQFLTGKTLIKPLCSSPEERINGNNEIQKNSENQNENESDQTMTNNVSIEGSGSCWNEQGITKLMEIRTSMDSAFQEILGGCSDDFLWEEVAGKMAQLGFDQKSALLCKEKWEWISNGKKKMNKKRKDNSSSCGVYYPITEENTIYNNQESGYNDNDQRHQMNEQGNVGSSTSNVNAAAGNPSGAMAANTNCFPFFMGDGDQNLWESYGLRLNKGENHE

SEQ ID NO: 651 - protein, 571 aa, Brassica napus
MEDHPSQYGIPELRQLMKGGGRTTSPSTSSHFPSDFFGFNLTAPPQQHRVQQFTTDHQEMGFLPHGIHGLGGSSSTTAGNNSNLNASTCGGGVGFGGFLDGGGFSGGDGGATGRWPRQETLTLLEIRSRLDHKFKEANQKGPLWDEVSRIMSEEHGYQRSGKKCREKFENLYKYYKKTKEGKAGRQDGKHYRFFRQLEALYGDSNNLVSIPNHNTQFVSNALHGFHAQNVTTTTSNIHSVDGLHGFHHQQSLSLSNNYNSSEMELMTSSSEGNDSSSRRKKRSSWKAKIKEFIDVSMKRLIERQDAWLEKLTKVIEDKEEQRMMKEEEWRKREAARVDKEHLFWAKERERMEGRDVAVIEALQYLTGKQLIKPLCSSPEERNNENGSDQTMTTNNVSVKGSGRCWDEQEIIKLREIRSSMDSAFQEVLEGSSDEFLWEEVAAKLTQLGFDQRSALICKEKWERISNGKMKEKKQINKKRKENSSSCGVYYPRTEENQIYNNQESGYNDNDQHHQKMNEHGNNVGSSTSNANAGNPSGAMAASTNCFPFFMGDGDQNLWESYGLRLSKEENQ

SEQ ID NO: 652 - protein, 510 aa, Brassica napus
MEDHHTQYGIPELRQLMKGEGRTTTTASPSTSHFPSDFLGFNLAPAAPPPPQHHRVHQFNTDPEMCFLPHGIHGLGGGSSTAGNNSNLNISTSGGGVRFSGFLDGGGLGGSGGTGRWPRQETLTLLEIRSRLDHKFKEANQKGPFWDEVSRIMSEEYGYQRSGKKCREKFENLYKYYKKTKEGKAGRQDGKHYRFFRQLEALYGDSNNLVSFPNHNTQFMSSALHGFHTQNAMNIPTTTSNIHEVDSSVHGFLHHQSLSISNNNNSSELELMTSSSDGNDSDSRRKKKSWKAKIKEFIDVNMKRLIERQDIWLEKLTKVIEDKEEQRMMKEEEWRKSEAARVEQVHLFWAKERERMEARDVAVLEALQYLAGKTLIKPSCSSPEERINGNNEIQNNSENEKWECISNGMRKEKKQINKRRKENSSSCGVYYPKTEENSIYIIQESGCNDNDKHHQMIEQGNVGSSTSNAAAGDLRGAMAASTNCFPFVMGDGDQNLWESYSLRLSKGENQ

SEQ ID NO: 653 - protein, 510 aa, Brassica napus
MEDHHTQYGIPELRQLMEGEGRTTTTASPSTSHFPSDFFGFNLTPAAPPPPPQHHRLHQFTINQEMGFLPHGIHGLGGGSSTAGNNSNLNMSTSGGGVGFSGFLDGGGLGGSGGTGRWPRQETLTLLEIRSRLDHKFKEANQKGPFWDEVSRIMSEEYRYQRSGKKCREKFENLYKYYKKTKEGKAGRQDGKHYRFFRQLEALYGDSNNLVSFPNHNTQFMSHALGFHTQNAMNITATTSNIHDVDSAHGLLHHQSLSISNNYNSSELELMTSSSEGNDSDSRRKKRSWKAKIKEFIDVNMKRLIERQDIWLEKLTKVIEDKEEQRMMKEEEWRKSEAARVEQVHLFWAKERERMEARDVAVLEALQYLAGKTLIKPSCSSPEERINGNNEIQNNSENEKWECISNGMRKEKKQISKKRKDNSSSCGVYYPRTEENAIYNNQESGYDDNDQHHHQMNEQDNVVSSTSNAAAGDLRGAMAASTSCFPFVMGDGDQNLWESYSLRLSKGENQ

SEQ ID NO: 654 - protein, 222 aa, Brassica napus
MERDKCLMSMKFRPVVTRQSSNAALLWPFGEEYGGGGGCMWPPRSYTCSFCGREFKSAQALGGHMNVHRRDRARLKQQSLSSSSTDQTTPLDYDHQQQVQKQHEVLDVGPKFPVQEDSRKPNGSKREISDVGNSNVLESSMKRFEHYNDEVKTDLSIGLVSSEFDSRRKQLINGVLASKKAKTDVSRLPMMVGLVIGVSKINGHHEELDLELRLGADPPKVN

SEQ ID NO: 655 - protein, 538 aa, Glycine max
MEMEDHHRHHHQYGITDLRQLVNGPRPTHFPTMPPPPKAELFPGDSNLQAATQQHYEMMMFEAETAGCIGGDASTGRWPRQETLTLLEIRSRLDSKFKEANQKGPLWDEVSRNMSEEHGYQRSGKKCREKFENLYKYYKKTKEGKAGRQDGKHYRFFRQLEALYGENSNQASVPETNFGSGSLRFHTSSHNNNPSQTNQEMFQSQKHCDSLSLTNSTDLDTSSSDDNDQNSTGRELNKDNDSMEKRRKRVSGRSWKVKIKDFIDSQMRKLVEKQEEWLDKLTKTLEQKEKERVLREEEWRRQESVRLEREHKFWAKERAWIEARDAALMEALHKLTRNEIMKSTHSHEGLMVTGIQIHSENQNEDGSEILNSTAARGAESWPESEIARLQQLRAEMETRYMQSGFSEEVMWEEIATKMACFGYERSALVFKEKWESISSNYARSAKDGSKKRKEDSRSCFYFDNSDQSSLYNQGGAYCDINDQRHETGRLQTNDGSSPSNSNVGNAVAGDNCFPFLMTEGGNLWENYSLKVNKACQNQ

SEQ ID NO: 656 - protein, 546 aa, Glycine max
MEMEDHHQYGIADLRQLPKAELFPGGGGGHPNLQAATQQHYEMMMFGRQVADIIPRCLHDFAPTDSATNIAVATPTTTTSASTPPLSCLEAETAGCIGGDASTGRWPRQETLTLLEIRSRLDSKFKEANQKGPLWVEVSRIMSEEHGYQRSGKKCREKFENLYKYYKKTKEGKAGRQDGKHYRFFRQLEALYGENSNQASVPETNFGSGSLRFHTSSHNNPSQTNQEMFQSQKHCDSLSLTNSTDLDTSSSDDNDQNSTGGGLKDNDSMEKRRKRMRKLVEKQEEWLDKLTKTLEQKEKERVLREEEWRRQEAARLEREHKFWAKERAWIEARDAALMEALHKLTGNGIIKSTHSPDGLMVTGIQNHSENQNEDGSEILNSTTARGAESWTESEIARLQQLRAEMETRYMQSGCSEEVMWEEIATKMACFGYERSAVVFKEKWESISNYARSVKDGSKKRKEDSRSCFYFDNSDQSSLYNQGGAYCDINDQRHKTGRLQTNDGSSPSNSNVGNTVAVDNCFPFLMTESGNLWENYSLKVNKASQNQ

SEQ ID NO: 657 - protein, 594 aa, Glycine max
MEMEDHQHQHHHHHFGMNDLRQVVNNGPRPAHTTFPSMPPHPTEELFPGHHHRNLTPLPTHHPQQQQHFEVMMFGRDIMPPGLHDFASTPHDSAVATTTITLPTPPVTCGFDAAEGAGCIGGDPFTGRWPRQETLTLLEIRSRLDPKFKEANHKGPLWDEVSRIMCEEHGYQRSGKKCREKFENLYKYYKKTKEGKAGRHDGKHYRFFRQLEALYGENSNTVSVPETNVVVGSIHFQGPSQTNQDNNKFQSHNNNNNRHCDSLSLTNSTNFDTSTSEGHDGNDHSMENESMEKRIKRKSGRSWKVKIKDFIDSQMRKLVEKQKEWLDKLVKTLEEKEKERMLREEEWRKQEANRLEREQKFWAKERAWIEARDAALMEALHKLTGREIMKVETDPEGTINVMTAAEVQNQNNEDESEILNSSNVIRGADSWQESEITRLEQLRAEMETRFPYSEISEEVSWDVVATKMADFGYERSALMCKEKWESINKEEKNSKNRKENLSRNCFYFKNNHEDQQQSSLYDQGSAYCDDDVNEQGKEIERLQTNNGSSSPSKSNIVGNVVPSDSCFPFLMGADQGGNLWENYGLKLNKENQNH

SEQ ID NO: 658 - protein, 235 aa, Glycine max
MEESQYLLWIKRKQILNNNNNSSSWEERAFAEDAARILGGCIWPPRSYSCNFCKREFRSAQALGGHMNVHRRDRARLKQSLSTVATSKVSSSRASTISTQEICSHQPTMSLYSSLIGWGHHHHMESPDSEPKGQVNAREEFLKGLGCNDYVETSLSVGQSAVFGQKLPTTESCGDESISYKRSKTSMPPLPGVFLKPCSNDRNLTFQSAEFVLGLKPGMEDLDLELRLGKPQKVI

SEQ ID NO: 659 - protein, 628 aa, Oryza Sativa
MQHPQGAGDPPYGVVPAPPTMAAAFDLPPVTTPAPAAPSDVLLPTQPQVSGPEEFPAAAVNSNDDDMMMVDDVVVAGGVGGSGSTGNRWPREETLALIRIRSEMDAAFRNATLKAPVWEELSRRLAELGYQRSGKKCKEKFENVDKYYKRTKEGRTGRQDGKSYRFFSQLEALHAAAPPPPPQQRQGMPVEDPQPLAMAWMMLPGAADLGFLSMSSESESDDESDEEEEEEEAVAPGGGGREGLGDDGDGDGEGGSSTRKLMAMFEGMMRQVTEKQDAMQRVFLETLEKWEAERTEREEAWRRKEVARINREREQLSKERAAAASRDAALIAFLQRVGGAGGEPVRLSPSSAGATRHDAAAAGLQLVPVPAPRAKAEDAWAAAGGDGSGTTAPSRWPKEEVQALIDLRMEKEEQYNDMGPKGPLWEEIAAGMQRIGYNRSAKRCKEKWENINKYFKKVKESNKRRPEDSKTCPYFHQLDAIYRKKHFAGRGGGGGGVTIAASHSSLAIVTVSEQDNPSQRELEGKSSNDVGNVQLAVPLLVHNAPDKKVEGSEGEPNVTAAAEETDSDEMCGEYTDDGDDDDKMQYKIEFQKPTAGGGGDGNDAPVPATTAAATSSAPTSNTSFLAVQ

SEQ ID NO: 660 - protein, 725 aa, Oryza Sativa
MPPFSAAGGEGAPSPISSRPPPPEQAAAAAAEEQLNGSSLEHDGVLGGEEGDRGGSSAGNRWPRQETLALLKIRSEMDAAFREAALKGPLWEEVSRKLAEMGYKRSAKKCREKFENVDKYYKRTKDGRAGRGDGKTYRFFTELEALHGAAAATARPPPVSLAPAPVAVAPPATPAGLSALRVHASPPPPPVKQHAAPPPPVMDVAACVMTMDDVSFSSGSDTEETAEEGGKRKRRGGGGIGGGGGGGKAMRMFEGLMRQVMERQEAMQQRLLEAIERRDQERMIREEAWRRQEVARLAREQDALAQERAIAASRDAAVISFIQRVTGQSIAAVPPPPLQPTPVASAAPPPPPQHHHQQTPPPIQVQPHHIMPMTPQPQLQPPQPQSKEANTVVRAAPPPQEQHDTAASGGGGGASSSRWPKAEVHALIQLRTELETRYQDSGPKGPLWEDISAGMRRLGYSRSSKRCKEKWENINKYFKKVKESNKKRPEDSKTCPYYHQLDALYRTKAANAAAAASASPAPATTTVLAPVPLSQTPPHVDHGGSNGNGNGWASANNGGGGSSSGGMQTKASNNGTATAGGLPVVSVAGGNGNGNGVAATTDNKGSKQVPVAKETAGQRQPQPLAMNHNYGNDRMADDMDSDSMDDDDDDDEFDDDENDDDIGGGKMQVQYETSSHFQRPQLQNQNVVVGRPNASGGGGGGAPTTPAGPPPPAATSGTSFLACVQ

SEQ ID NO: 661 - protein, 860 aa, Oryza Sativa
MAIYYLEREGLTHNMPMHGHFYTPLPLNHWHADTTNAADMTRGPMRMWAPHVSGMNFIFFISKEKVLMRVEMVSSPDVLIIPSPPFPSGNTRGGGGGGGGSSMQQQQPGGGGGGVQQFGAVAPEMSPFSPAGGGGGGRISMAEAASPISSRPPPAQQQFDELGVGGGGGGGGGFDAEALAAAAVGEEGASGGAGGNRWPRQETLALLKIRSDMDAAFRDATLKGPLWEEVSRKLAEEGYRRSAKKCKEKFENVHKYYKRTKESRAGRNDGKTYRFFTQLEALHGTAAGVVAAPSPVTSLAPPPATAVGVSGGVRAPAEPPPAVVMGNVMSFSTSNTEEYSDEEDSDDEGTEDMGGGGGDERGKRKRLSEGGAAAGVGDGAAGGDAAAVSGGHREAGAGPDDPRGGVAAAGDARLAREQEIPAGARHVGDAAVVSFIQKITGQTIPMPPIIAAPAITVMPPPAPSQQPQPPPPPSHPTPITSVAPAPPPPPPAAAAAAASQPSPQATKSPLPATPQTQSSMDIVMTAAEAHDAGYDGSGGGGGQPSSSRWPKAEVHALIQLRSNLDNRYQEAGPKGPLWEEISAGMRRLGYSRSSKRCKEKWENINKYFKKVKESNKKRPEDSKTCPYFHQLDALYRNKAALNSSSSSAAAAAPALPPPEHAEPAVTVAAPISQTPPPPPPQPVTTTKNGNGTSSTNGANGEGGGGGSGGMQMQASNGSVVAGNKFFTGAAAKKPEDIMKEMMEQRPQQPAAANNAFNRTDGGGGGGGVDSDNMDEDDEDDYDDDDDDDDDDVDGNKMQYEIQFQHQHHHQQPPQHRHQQSVVRPNAAASAAAGGNPPGTAAPATAAAATTTTGSFLAMVQ

SEQ ID NO: 662 - protein, 318 aa, Oryza Sativa
MDPARYWILARRKLGDQKAPLFPTPHITIGAGGSSTSYYESWEERAFAEDSAGHLGGCIWPPRSYSCSFCGREFRSAQALGGHMNVHRRDRARLKLSGVVEDGTGGESHGMPPNQNYMIQPCPPQIGTLQHAYSPNPRSGSILAADTNPNSICDVVAYPARSLLQVAAARTALGKQVLNAPLVSSKSPSAGREHGKRETLFLGAVRLAQDHDTVSSNLDLRVGKNELKITTVLGCRSRRDFMYDNDRADDEKTVEASHKKRRIDLEVNPLILTSSTSNHQQQDGGDDQHHEKILKLYRSSSVEELDLELRLGEAPKEQ

SEQ ID NO: 663 - protein, 445 aa, Brassica napus
MEELPSITVSQREQFLVENDVFGMYSYFDTSDIATQKFMVEIQRDKQLDYLMNGLRQLGPSFSSLDANRPWVCYWIIHSIALLGESVDDDLENNAIDFLGRCQGSDGGYGGGPGQLPHLATSYAAVNTLVTLGGEKAFSSINREQMACFLRRMKDTNGGFRMHNMGEIDVRACYTAISIASILNIVDDELTRGLGDYILSCQTYEGGIGGEPGSEAHGGYTYCGLATMILINEVDRLNLDSLMNWVVHRQGVEMGFQGRTNKLVDGCYTFWQAAPCVLLQRFFSSQDMAPHGSSSRMSQGTDEDHEEYAHDEDDPEDSDEDDSDEDSDEDSGNGHQVHHTSTYIDRRIQPVFDSLGLQRYVLLCSQVADGGFRDKLRKPRDFYHTCYCLSGLSVAQHAWSKDEDTPPLTRDILGGYANHLEPVHLLHNVVMDRYNEAIEFFHRAA

SEQ ID NO: 664 - protein, 262 aa, Brassica napus
MCSLATNLLFPSKMKPAFTEKQSTSSLFVTTNNRSKMKNRSAVPVARLFGPAIFEASKLKVSFLGVDEKKHPSKLPRTYTLTHSDITAKLTLAISQSINNSQLQGWANRLFRDEVVAEWKKVKGKMSLHVHCHISGGHFLLDLIAKLRYYIFCKELPVVLKAFVHGDGNLLNSYPELQESPVWVYFHSNIPEYNKVECWGPLWEATQHNHDGKRTRKKCETLPELACPDECKCCFPSVSTIPWSHRHYQHGRGDENENFKLK

SEQ ID NO: 665 - protein, 266 aa, Brassica napus
MNSLSANMLLPTRLKPAYSDKRGNSTNSLPVSNTRSKRKNQSVVPMARLFGPAIFESSKLKVLFLGVDDKKHPPTLPRTYTLTHSDITAKLTLAISHSINNSQLQGWANRLYRDEVVAEWKKVKGDMSLHVHCHISGGHFLLDLFPKLRYYIFSKELPVVLKAIVHGDGNLLNNYPDLQEALVWVYFHSNADEFNRVECWGPLWEATSSDGHRTQTLPETRCKDECSCCFPQVSSIPWSHSLSNEGVGGYSGTQSEGMSTPNPEKL

SEQ ID NO: 666 - protein, 321 aa, Brassica napus
MESFPIINLEKLNGEERGLTMEKIKDACENWGFFECVNHGIPHELLDRVEKMTKEHYKKCMEDRFKESIKNRGLDSVRSEVNDVDWESTFYLKHLPASNISHVPDLDDDYRTLMKEFAGKIEKLSEELLDLLCENLGLEKGYLKKVFYGSKSPTFGTKVSNYPPCPKPDLIKGLRAHTDAGGIILLFQDDKVSGLQLLKDGEWVDVPPVKHSIVVNLGDQLEVITNGKYKSVEHRVIAQTDGEGRMSIASFYNPGSDSVIFPAPELIGKENEKKDNYPKFVFEDYMKLYSAVKFQAKEPRFEAMKAMETTVANNVGPLATA

SEQ ID NO: 667 - protein, 1110 aa, Brassica napus
MEISSAESESLSISGAAASSEAASESSVSSPSSSSLSASSQASPTAFSAVDPASATATASRYVDDDEDEEDVCRICRNPGEADNPLRYPCACSGSIKFVHQDCLLQWLNHSNARQCEVCKHPFSFSPVYAENAPTRLPFQEFVVGIAMKACHVLQFFLRLSFVLSVWLLTIPFITFWIWRLAFVRSFGEAQRLFLSHISTTVILTDCLHGFLLSASIVFIFLGATSLRDYFRHLRELGGQDEREDEGERNGVRAARRPAGQGNRNLAGEGNVEDAGDQGAGVGQVNRRNPENVLARLDIQAARLEAQVEQMFDGLDDADGAEDVPFDELVGMQGPVFHLVENAFTVLASNMIFLGVVIFVPFTLGRVILYHLSWLFAAARGPALTASMHFIDSALENTTLKSALTSVSNLTNEGQENGLVGQLSEMVKVNGSELNGVNSTLSVAADLLKGSVTGSSKLSDVTTLTVGYMFIVFLVFLYLGIIALIRYAKGEPLTVGRFYGIASMVEAVPSLLRQFLAAMRHLMTMIKVAFLLVIELGVFPLMCGWWLDVCTVRMFGKTMSHRVQFLSISPLASSLVHWVVGIMYMLQISIFVSLLRGVLRPGVLYFLRDPADPNYNPFRDLIDDPVHKHARRVLLSVAVYGSLIVMLVFLPVKLAIRMAPSIFPLDISVSDPFTEIPADMLLFQICIPFIIEHFRLRTTIKSLLRCWFTAVGWALGLTDFLLPRPEDNVGQDNGIGEPGRQNRAQVGGPDRAIAALPAADDPNRNLPRAGNVNAGEEYEDDEEQSDTDRYNFVIRIILLLLYAWVTLLLFNSALIVVPVSLGRALFSAIPVLPITHGIKCNDLYAFVIGTYAFWTAISGGRYAIEHVKSRRTSVLLNQIWKWCGIVFKSSVLLAIWVFIIPVLIGLLFELLVIVPMRVPVDESPVFLLYQDWALGLIFLKIWTRLVMLDHMLPIMDDSWRAKFERVREDGFSRLQGLWVLREIVFPIVMKLLTALCVPYVLARGVFPMLGYPLVVNSAVYRFAWIGCLSVSLFCFCAKRCHVWFRNLHNSIRDDRYLIGRRLHNFGEAALANQNLNQSSEDAGGDGGVLIGREGDADTGLRLRRAIQQEA

SEQ ID NO: 668 - protein, 459 aa, Glycine max
MSEESERDTNPAAAPPCPTVSQRDQWMVESQVFQIYQLFATIPGSAQNLMYLSQLELQRDNHMQYLSKGLRHLSSAFSVLDANRPWLCYWIFHSIALLGESVDDELEDNTIDFLNRCQDPNGGYAGGPGQMPHIATTYAAVNTLITLGGQKSLASINRDKLYGFLRRMKQSNGGFRMHDEGEIDVRACYTAISVASVLNILDDELIKNVGDYILSCQTYEGGIAGEPGSEAHGGYTFCGLATMILIGEVNRLDLPRLVEWAVFRQGKECGFQGRTNKLVDGCYSFWQGGAVALLQRLSSIINKQMEEASQTFTISDVSEAKESLDGTSSHATCHGKHEGTSQSCSADYKSIGYNFINEWRAQEPLFHSIALQQYILLCAQEQAGGLRDKPGKRRDHYHTCYCLSGLSLCQYSWSKHPDSPPLPNLVLGPYSNLLEPIHPLFNVVLERYREAHVFFFTES

SEQ ID NO: 669 - protein, 455 aa, Glycine max
MSEESERETNPPPPPPCPTVSQREQWMVESQVFQIYQLFATIPRNAQTLMLELQRDNHMQYVSKGLRHLSSAFSVLDANRPWLCYWIFHSIALSGESVDDELEDNAIDFLNRCQDPNGGYAGGPGQMPHIATTYAAVNSLITLGGEKSLASINRDKLYGFLRRMKQPNGGFRMHDEGEIDVRACYTAISVASVLNILDDELIQNVGDYIISCQTYEGGIAGEPGSEAHGGYTFCGLATMILIGEVNHLDLPRLVDWVVFRQGKECGFQGRTNKLVDGCYSFWQGGAVALLQRLSSIINKQMEETSQIFAVSYVSEAKESLDGTSSHATCRGEHEGTSESSSSDFKNIAYKFINEWRAQEPLFHSIALQQYILLCAQEQEGGLRDKPGKRRDHYHTCYCLSGLSLCQYSWSKHPDSPPLPNLVLGPYSNLLEPIHPLFNVVLGRYREAHEFFFTES

SEQ ID NO: 670 - protein, 261 aa, Glycine max
MCTLTTVPVLPSKLNKPSLSPHHNSLFPYCGRRVGKKNKAMVPVARLFGPAIFEASKLKVLFLGVDENKHPGNLPRTYTLTHSDITAKLTLAISQTINNSQLQGWYNRFQRDEVVAQWKKVKGRMSLHVHCHISGGHFLLDILARLRYFIFCKELPVVLKAVVHGDENLFNSYPELQDALVWVYFHSNIPEFNKVECWGPLKEASAPTGGVQEEGLAIPQPCQEECQCCFPPLTLSPIQWSKQVPSRHYEPCDGIGTQQNL

SEQ ID NO: 671 - protein, 271 aa, Glycine max
MGTLTTVPVLPSKLNKPSLSPRHNSLFPYYGRRVGKKNKAMVPVARLFGPAIFEASKLKVLFLGVDENKHPGNLPRTYTLTHSDITAKLTLAISQTINNSQLQGWYNRLQRDEVVAQWKKVKGKMSLHVHCHISGGHFLLDILARLRYFIFCKELPVVLKAVVHGDENLFNNYPELQDALVWVYFHSNIPEFNKVECWGPLKEASAPIGGAKEESEQETLLSKEGLAIPQPCQEECECCFPPLTLSPIQWSQQVPSHHYEPCDGIETQQSL

SEQ ID NO: 672 - protein, 318 aa, Glycine max
MEKFPVVDMGNLNNEERSATMEIIKDACENWGFFELVNHGISIELMDTVERMTKEHYKKCMEQRFKEMVASKGLESAQSEINDLDWESTFFLRHLPASNISEIPDLDEDYRKVMKDFAVELEELAELVLDLLCENLGLEKGYLKKVFYGSKGPNFGTKVSNYPPCPKPELIKGLRAHTDAGGIILLFQDHKVSGLQLLKDGHWIDVLPMRHSIVINLGDQLEVITNGKYKSVMHRVITQTDGNRMSIASFYNPGNDALIAPAPALVKEDETSQVYPKFVFDDYMKLYAGLKFQAKEPRFQAMKATESSNINLGPIATV

SEQ ID NO: 673 - protein, 1124 aa, Glycine max
MEIAHEPSPSLDGSPFAAAETLANSPSSSSSSPSSSSSSASSPRGAKGKEVESTASGTATSPAPAKYDDEDEEEEDVCRICRNPGDAENPLRYPCACSGSIKFVHQDCLLQWLNHSNARQCEVCKHAFSFSPVYAENAPARLPFQEFVVGMAMKACHVLQFFLRLSFVLSVWLLIIPFITFWIWRLAFVRSLGEAQRLFLSHLSTAVILTDCLHGFLLSASIVFIFLGATSLRDYFRHLREIGGQDADREDEVDRNGARIARRPPGQANRNINNGDGNGEDAGGVQGIAGAGQVIRRNAENVAARWEMQAARLEAHVEQMFDGLDDADGAEDVPFDELVGMQGPVFHLVENAFTVLASNMIFLGVVIFVPFSLGRIILHYLSWFFSTASGPVLSAVAPLADTSLSLANITLKNALTAVKNMSSETQENGSIGQVAEMLKANASEMSEMSNITSASAVILKGVSIGTSRISDVTTLAIGYVFILTLIFCYFGIVALIRYTKGEPLTMGRFYGIASIAETIPSLFRQFLAAMRHLMTMVKVAFLLVIELGVFPLMCGWWLDVCTIQMFGKTMVHRVQFFSASPLASSLVHWVVGIVYMLQISIFVSLLRGVLRNGVLYFLRDPADPNYNPFRDLIDDPVHKHARRVLLSVAVYGSLIVMLVFLPVKHAMRMAPSIFPLDISVSDPFTEIPADMLLFQICIPFAIEHFKLRTTIKSLLRYWFTAVGWALGLTDFLLPKPDESVNQENGNGEPARQERLQIVQAGVHDQGLVPFAGDDLNRAIITVEEMNAEEDYDNDEQSDSDSYAFVLRIVLLLVIAWMTLLVFNSALIVVPISLGRTLFNSIPRLPITHGIKCNDLYAFIIGSYVIWTAVAGVRYSIEQIRKRRSSVLFGQIWKWCGILVKSSALLSIWIFVIPVLIGLLFELLVIVPMRVPVDESPVFLLYQDWALGLIFLKIWTRLVMLDHMMPLVDESWRVKFERVREDGFSRLQGLWVLREIVLPIIMKLLTALCVPYVLAKGVFPVLGYPLVINSAVYRFAWLGCLSFSFVCFCAKRFHVWFTNLHNSIRDDRYLIGRRLHNFGEHAEKANVAETNSGEKDTILLGTGLNQQDREADVGLRLRHVNQQVG

SEQ ID NO: 674 - protein, 34 aa, Glycine max
MEVNILVFIATVLFILVPTAFLLIIYVKTVSQSD

SEQ ID NO: 675 - protein, 297 aa, Brassica napus
MDVPIVDLSNPNEDLVARAVVKASEEWGIFQVVNHGIPPELIRRLKEVGTKFFELPETEKEAVAKPEDSVDVEGYRTKYQKDLEGRNAWIDHLFHRIWPPSRVSYRFWPKLPMDYREVNEDYAKHLKKLSEKIMEWLSEGLGLRREALIEGLGGETVEYLMKINYYPPCPDQDLVIGAPDHTDVNGITFLVANEALGLQAFKDNHWIDVKYTTSGIIVIVGDQFHRMSNGKYMSAKHRATMDKEKTRISWPVFVESSLDHEFAPLRELITGEDNAPKFKPYVYKDFKFRKLKKLPLD

SEQ ID NO: 676 - protein, 228 aa, Brassica napus
MDVEGYRTKYQKDLEGRNAWVDHLFHRIWPPSRVSYRFWPKLPMDYREVNEDYAKHLKKLSEKIMEWLSEGLGLRREALIEGLGGETVEYLMKINYYPPCHDQDLVIGAPDHTDVNGITFLVANEALGLQAFKDNHWIDIKYTTSGIIVIVGDQFHRISNGKYMSAKHRATMDKEKTRISWPIFVESSLDHEFAPLRELITGEDNAPKFKPYVYKDFKFRKLKKLPLD

SEQ ID NO: 677 - protein, 251 aa, Brassica napus
MSSSNCPSPLPTVTKLQVDSVTFPPSVISPASSNPLFLGGAGVRGLDIQGKFVIFTVIGVYLDPVSVPSLSVKWKGKTTEELTESVPFFREIVTGSFEKFIKVTMKLPLTGQQYSEKVTENCVAIWKSLGIYTDSEAKAVERFLEVFKDETFPPGASILFALASKGSLTVAFSKDDSIPETGKAVIENKLLAEAVLESIIGKNGVSPGARLSVAERLAQLMNSDKVEEDATKTDQEEANNLPLGDKLAKEN

SEQ ID NO: 678 - protein, 358 aa, Brassica napus
MAPGTLNELAGETKLNSKFVRDEDERPKVAYNEFSTEIPVISLAGIDDVGEKRGEICRQIVEACENWGVFQVVDHGVDTSLVADMTRLARDFFALPPEEKLKFDMSGGKKGGFIVSSHLQGESVQDWREIVTYFSYPVRNRDYSRWPTKPEGWVKVTEEYSERLMGLACKLLEVLSEAMGLEKEALTNACVDMDQKIVVNYYPKCPQPDLTLGLKRHTDPGTITLLLQDQVGGLQATRDDGKTWITVQPVEGAFVVNLGDHGHYLSNGRFKNADHQAVVNSNSSRLSIATFQNPAPEATVYPLKVREGEKPILEEPITFAEMYKRKMSRDLELARLKKLAKEEHDHKEAAKPLDQIIA

SEQ ID NO: 679 - protein, 717 aa, Brassica napus
MTNLYLTILLPTFIFLIVLVLSRRRNNRLPPGPNPWPIIGNLPHMGPKPHQTLAAMVTTYGPILHLRLGFADVVVAASKSVAEQFLKVHDANFASRPPNSGAKHMAYNYQDLVFAPYGQRWRMLRKISSVHLFSAKALEDFKHVRQEEVGTLMRELARANTKPVNLGQLVNMCVLNALGREMIGRRLFGADADHKAEEFRSMVTEMMALAGVFNIGDFVPALDCLDLQGVAGKMKRLHKRFDAFLSSILEEHEAMKNGQDQKHTDMLSTLISLKGTDFDGEGGTLTDTEIKALLLNMFTAGTDTSASTVDWAIAELIRHPEIMRKAQEELDSVVGRGRPINESDLSQLPYLQEEVGTLMRELARANTKPVNLGQLVNMCVLNALGREMIGRRLFGADADHKAEEFRSMVTEMMALAGVFNIGDFVPALDCLDLQGVAGKMKRLHKRFDAFLSSILEEHETMKNGQDQKHTDMLSTLISLKGTDFDGEGGTLTDTEIKALLLNMFTAGTDTSASTVDWAIAELIRHPEIMRKAQEELDSVVGRGRPINESDLSQLPYLQAVIKENFRLHPPTPLSLPHIASESCEINGYHIPKGSTLLTNIWAIARDPDQWTDPLSFRPERFLPGGEKAGVDVKGNDFELIPFGAGRRICAGLSLGLRTIQLLTATLVHGFEWELAGGVTPEKLNMEETYGITLQRAVPLVVHPKPRLDMSAYGLGSA

SEQ ID NO: 680 - protein, 353 aa, Brassica napus
MGRAPCCEKVGIKRGRWTAEEDQILSSYIQSNGEGSWRSLPKNAGLRRCGKSCRLRWINYLRSDLKRGNITPEEEDLVVKLHSTLGNRWSLIASHLPGRTDNEIKNYWNSHLRRKLHNFIIRKPSISHNVLAVVINAPPRSPRPPTKRRPGRTSRSTMKPKTHHPKIRKMKKTSEPPEPEASVAVKAGEETLMMELNEAEAELGPCNYYVTCHEGGACRNNDNNNSSIDCDKGVSSFDEDIVDLLLDESAPSHVFTSCESLDCLQSCPSMETFLNYEHQVNNAFTGEFIDWDDCVWQQGNDNNICDEKEGSDSIVSWLLDGEDEATIGESNCENSGEPLDHDEENALVAWLLS

SEQ ID NO: 681 - protein, 343 aa, Brassica napus
MGRAPCCEKIGLKRGRWTAEEDEILTNYIQTNGEGSWRSLPKKAGLLRCGKSCRLRWINYLRRDLKRGNITAEEEETIVKLHSLLGNRWSHIATHLPGRTDNEIKNYWNSHLSRKIYAFTTVTGDEHSLKVDDLVLNKSSSSSLGAKNTNKTKKKKGRTSRSSMKKHKQMVTASQCLPQPKELESEISEGWNSGNYEGKSLGAYEWLDGEIERLMSSFVWECASEEAVISMNDDDPDQNKVCESGDNISCCVDLFEEEQGKLGSLHVDQDMNIEKEREESILSSNSNESGDKDWWVGLCDSSEVGFGINDELLGWEFQGGLTCQTDDLWDLSDFGEIQQVDSI

SEQ ID NO: 682 - protein, 267 aa, Brassica napus
MGRATWFDADGTKRGGWTDEEDQKLVAYINEYGIGDWRFLPRKAGSLQRCGKSCRLRWLNYLRPGVKKGKFTPEEEEAIINFQSVLGNRWAAIAQQMPGRSDNDIKNHWNSCLKKRLERNGIDQMTHQPIINLAVKTPSFNIDCGNSSSSMVSPSPSFSSSGSASLLNRLATGISSREHGVDRIKNILSDPRTPIITTQEEEFEEPNKDHGKALAGDDQEDDFLMWDEENMRHFMDEIGQMDFETNGVYNPSSSSPYGVYETGLLDD

SEQ ID NO: 683 - protein, 333 aa, Glycine max
MDTLRVQSLASQSKETIPAEFVRSETEQPGITTVHGTQLGVPIIDFSNPDEDKVLHEIMEASRDWGMFQIVNHEIPSQVIEKLQAVGKEFFELPQEEKEQYAKPADSTSIEGYGTKLQKEVDNKKGWVDHLFHRIWPPSDINYRFWPKNPPSYREANEEYDKYLHGVVDKLFESMSIGLGLEKHELKEFAGGDNLVHLLKVNYYPPCPCPDLVLGVPSHTDMSCITLLVPNHVQGLQASRDGHWYDVKYIPNALVIHIGDQMEIMSNGKYKAVLHRTTVSKDETRISWPVFVEPQPEHEVGPHPKLVNQDNPPKYKSKKYKDYAYCKLNKIPQ

SEQ ID NO: 684 - protein, 334 aa, Glycine max
MEVLRVQTIASKSKDAAIPAMFVRAETEQPGITTVQGVNLEVPIIDFSDPDEGKVVHEILEASRDWGMFQIVNHDIPSDVIRKLQSVGKMFFELPQEEKELIAKPAGSDSIEGYGTKLQKEVNGKKGWVDHLFHIVWPPSSINYSFWPQNPPSYREVNEEYCKHLRGVVDKLFKSMSVGLGLEENELKEGANEDDMHYLLKINYYPPCPCPDLVLGVPPHTDMSYLTILVPNEVQGLQACRDGHWYDVKYVPNALVIHIGDQMEILSNGKYKAVFHRTTVNKDETRMSWPVFIEPKKEQEVGPHPKLVNQDNPPKYKTKKYKDYAYCKLNKIPQ

SEQ ID NO: 685 - protein, 228 aa, Glycine max
MAMAFPSVTSVTVENVTFPPTVKPPCSPNTFFLAGAGVRGLQIHHAFVKFTAICIYLQYDALSFLSVKWKTKSTHQLTESDQFFSDIVTGPFEKFMQVTMIKPLTGQQYSEKVAENCVAIWRSLGIYTDSEAEAIDKFLSVFKDLTFPPGSSILFTVSPNGSLTISFSGDETIPEVTSAVIENKLLSEAVLESMIGKNGVSPAAKQSLASRLSHLFKEPGVCDPQSHK

SEQ ID NO: 686 - protein, 375 aa, Glycine max
MAPTAKTLTYLAQEKTLESSFVRDEEERPKVAYNEFSDEIPVISLAGIDEVDGRRREICEKIVEACENWGIFQVVDHGVDQQLVAEMTRLAKEFFALPPDEKLRFDMSGAKKGGFIVSSHLQGESVQDWREIVTYFSYPKRERDYSRWPDTPEGWRSVTEEYSDKVMGLACKLMEVLSEAMGLEKEGLSKACVDMDQKVVVNYYPKCPQPDLTLGLKRHTDPGTITLLLQDQVGGLQATRDNGKTWITVQPVEAAFVVNLGDHAHYLSNGRFKNADHQAVVNSNHSRLSIATFQNPAPNATVYPLKIREGEKPVMEEPITFAEMYRRKMSKDIEIARMKKLAKEKHLQDLENEKHLQELDQKAKLEAKPLKEILA

SEQ ID NO: 687 - protein, 513 aa, Glycine max
MSPLIVALATIAAAILIYRIIKFITRPSLPLPPGPKPWPIVGNLPHMGPVPHHSLAALARIHGPLMHLRLGFVDVVVAASASVAEQFLKIHDSNFSSRPPNAGAKYIAYNYQDLVFAPYGPRWRLLRKLTSVHLFSGKAMNEFRHLRQEEVARLTCNLASSDTKAVNLGQLLNVCTTNALARAMIGRRVFNDGNGGCDPRADEFKAMVMEVMVLAGVFNIGDFIPSLEWLDLQGVQAKMKKLHKRFDAFLTSIIEEHNNSSSKNENHKNFLSILLSLKDVRDDHGNHLTDTEIKALLLNMFTAGTDTSSSTTEWAIAELIKNPQILAKLQQELDTVVGRDRSVKEEDLAHLPYLQAVIKETFRLHPSTPLSVPRAAAESCEIFGYHIPKGATLLVNIWAIARDPKEWNDPLEFRPERFLLGGEKADVDVRGNDFEVIPFGAGRRICAGLSLGLQMVQLLTAALAHSFDWELEDCMNPEKLNMDEAYGLTLQRAVPLSVHPRPRLAPHVYSMSS

SEQ ID NO: 688 - protein, 338 aa, Glycine max
MGRAPCCEKVGLKKGRWTAEEDEILAKYIQANGEGSWRSLPKNAGLLRCGKSCRLRWINYLRADLKRGNISAEEENTIVKLHASFGNRWSLIANHLPGRTDNEIKNYWNSHLSRKIYSFPGAGAGASAGIMDTPKVVYIPPKRKCGRTSRWAMKKNKTYTQKNSDTAVPTPPTPSLESEGLSNAVNDFKVLDGDVAEFDEPRTEELEAEVNKHILGLCELEGINEDSGMLLGFSDILESCLAETTCGVWDISEERESNDVVAADACRDKIASSEEGSCSSMNQDWDWESVLEFSNAVDNWEDQDKLLTWLWEDDDCKRLGETDTQILQNDMVIDWFLS

SEQ ID NO: 689 - protein, 269 aa, Glycine max
MGRAPCCEKVGLKKGRWTAEEDKILTDYIQENGEGSWRSLPKNAGLLRCGKSCRLRWINYLRSDVKRGNITPQEEEIIVKLHAVLGNRWSVIAGHLPGRTDNEIKNYWNSHLRRKIYCFMKSLNESLPPIDMAAVNVAANSKRRTVQPTLKRSATSQSFINDEENPTEYSLDGYCENTYGTTASCLSSMDEVEALGPYQWLDDEIMKLTHICSSVNSVYDYHHHQWPDMQLEGSVDQSYNPWDFCEENQNEANCFWGTTGHNEGNGFYQ

SEQ ID NO: 690 - protein, 331 aa, Oryza Sativa
MAEVQSVQALASSLAALPPEFVRSEHERPGATTFRGGDAPEIPVIDMAAPESAARVAEAAAEWGLFQVVNHGVPAAAVAELQRVGREFFALPQEEKARYAMDASSGKMEGYGSKLQKDLEGKKAWADFFFHNVAPPAMVNHDIWPSHPAGYREANEEYCKHMQRLARKLFEHLSTALGLDGGAMWEAFGGDELVFLHKINFYPPCPEPELTLGVAPHTDMSTFTVLVPNDVQGLQVFKDGHWYDVKYVPDALIIHIGDQIEILSNGRYKAVLHRTTVDKDRTRMSWPVFVEPPPEHVVGPHPQLVTDGSPAKYKAKKFKDYRHCKINKLPM

SEQ ID NO: 691 - protein, 233 aa, Oryza Sativa
MAAVSEVEVDGVVFPPVARPPGSGHAHFLAGAGVRGVEIAGNFIKFTAIGVYLEEGAAVPALAKKWAGKSADELAADAAFFRDVVTGDFEKFTRVTMILPLTGEQYSDKVTENCVAAWKAAGVYTDAEGAAADKFKEAFKPHSFPPGASILFTHSPPGVLTVAFSKDSSVPEGAVAAAAIENRALCEAVLDSIIGEHGVSPAAKRSIAARVSQLLKAESTGDVAAAEPAPVSA

SEQ ID NO: 692 - protein, 377 aa, Oryza Sativa
MAPVATTFLPTASNEATLRPSFVRDEDERPRVAYNQFSDAVPVISLQGIDEAARAEIRARVAGACEEWGIFQVVDHGVDAGLVADMARLARDFFALPPEDKLRFDMSGGKKGGFIVSSHLQGEAVKDWREIVTYFSYPVKSRDYSRWPDKPAGWRAVVEQYSERLMGLACKLLGVLSEAMGLDTNALADACVDMDQKVVVNFYPKCPQPDLTLGLKRHTDPGTITLLLQDLVGGLQATRDAGKTWITVQPIPGSFVVNLGDHAHYLSNGRFKNADHQAVVNSDCCRLSIATFQNPAPDAMVYPLAVRDGEEPILEEPITFAEMYRRKMARDLELAKLKKKAKEQRQLQQAALPPPPPTQVAAELAAQKPKSLDEILA

SEQ ID NO: 693 - protein, 526 aa, Oryza Sativa
MDVVPLPLLLGSLAVSAAVWYLVYFLRGGSGGDAARKRRPLPPGPRGWPVLGNLPQLGDKPHHTMCALARQYGPLFRLRFGCAEVVVAASAPVAAQFLRGHDANFSNRPPNSGAEHVAYNYQDLVFAPYGARWRALRKLCALHLFSAKALDDLRAVREGEVALMVRNLARQQAASVALGQEANVCATNTLARATIGHRVFAVDGGEGAREFKEMVVELMQLAGVFNVGDFVPALRWLDPQGVVAKMKRLHRRYDNMMNGFINERKAGAQPDGVAAGEHGNDLLSVLLARMQEEQKLDGDGEKITETDIKALLLNLFTAGTDTTSSTVEWALAELIRHPDVLKEAQHELDTVVGRGRLVSESDLPRLPYLTAVIKETFRLHPSTPLSLPREAAEECEVDGYRIPKGATLLVNVWAIARDPTQWPDPLQYQPSRFLPGRMHADVDVKGADFGLIPFGAGRRICAGLSWGLRMVTLMTATLVHGFDWTLANGATPDKLNMEEAYGLTLQRAVPLMVQPVPRLLPSAYGV

SEQ ID NO: 694 - protein, 317 aa, Oryza Sativa
MGRAPCCEKVGLRRGRWTKEEDEKLARYIRENGEGAWRSMPKNAGLLRCGKSCRLRWINYLRADLKRGNISPQEEDIILNLHATLGNRWSLIAGHLPGRTDNEIKNYWNSHLSRKGYEFLRGGGGGAVVDVDLSKLPGGGKRRGGRTGRSSSGKEKTRTKEKDKAPAPEAAHNDDGGGGGGGGIDNVSAASHSHREEQAQASASGLTSDGLEEGPLGLSEEMVSGPVGPVSPKPEVGQDGSSAESGCCGPSGSSGPTEAVGQDMGDKSMDWDLVGLDDGFANDDMWGSLSWDYGELVGPDGVHQGEVLSDLFFLGNL

SEQ ID NO: 695 - protein, 358 aa, Oryza Sativa
MGRAPCCEKVGLKRGRWTTEEDEKLAGYIAKHGEGSWRSLPKNAGLLRCGKSCRLRWINYLRAGVKRGNISNQEEDVIIKLHATLGNRKSYVVKRMDYVCLGARDYCFQQNTHVRWSLIASHLPGRTDNEIKNYWNSHLSRQIHTYRRTYTAPSEAAVTIDVTKLQAAGKRRGGRTAGQSRKGDKKRAEDDPPKETAAADTPLPESSPRRAQSDEARSGSVVVDPEEPSSQPNNGSSGGGGGTPDGPCSEETATGPTSLDPMEMGLWEVESEFAEMEALLCGGVAPDGPGIPGLEPLDVAAQADDLLDMDWDGFAADLWGDPAQRGGLVQDAGEPNGSMGCSSDELESFASWLLSDSC

SEQ ID NO: 696 - protein, 244 aa, Brassica napus
MEGGASDEVAESSKKIGRGKIEIKRIENTTNRQVTFCKRRNGLLKKAYELSVLCDAEVALVIFSTRGRLYEYANNSVRGTIERYKKACSDAVNPPSVTEANTQYYQQESSKLRRQIRDIQNLNRHILGESLGSLNLKELKNLEGRLEKGIGRVRSKKHEMLVAEIEYMQKREIELQNDNMYLRSKINERAGMQQQEASVIHQQGTVYESSSHQSEQYNRNYIPVNLLEPNQNSSDQNQPPLQLV

SEQ ID NO: 697 - protein, 175 aa, Brassica napus
MREVLERHNLQSKNLEKLDQPSLELQLVENSDNSRLSKEIADKSHQLRQMRGEELQGLNIEELQQLEKALEAGLTRVIETKSEKIMSEISDLQRKGMKLMDENKRLRQHGTQLTEENERLGKQIYNNMHERYGGVESEKTAVYEEGQSSESITNAGNSTGAPVDSESSDTSLRLG

SEQ ID NO: 698 - protein, 179 aa, Brassica napus
MENMGSRVIEPLIVGRVVGEVLDFFTQTIEMNVSYNKKQVCNGHELFPSFVSSKPRVEIHGGDLRSFFTLVMIDPDVPGPSDPFLKEHLHWIVTNIPGTTDATFGKEVVSYEFPRPNIGIHRFVFVLFKQKQRHVIDISPNIPSRDKFNTRKFAIEHDLGLPVAAVFFNAQRETAARRR

SEQ ID NO: 699 - protein, 197 aa, Brassica napus
MGRKKLEIKPIENKSSRQVTFSKRRNGLIEKARQLSVLCDASVALLVVSASGKLYSFSSGVNLVKILDRYGKQHGDDLKALDRQSKALDCGSHHELLELVESKLEESNVDNVSVGSLVQLEEHLENALSVTRARKTELMLKLVENLKEKEKLLEEENHVLASQMEKSNLVRAEADYMEVSPGQISDINLPVTLPLLN

SEQ ID NO: 700 - protein, 196 aa, Brassica napus
MGRKKLEIKRIENKSSRQVTFSKRRNGLIEKARQLSVLCDASVALLVVSASGKLYNFSAGDNLVKILDRYGKQHADDLKALDLQSKAPKYGSHHELLELVESKLVESNSDVSVDSLVQLEDHLETALSVTRARKTELMLKLVDSLKEKEKLLKEENQGLASQMEKNNLAGAEADKMEMSPGQISDINRPVTLRLLY

SEQ ID NO: 701 - protein, 197 aa, Brassica napus
MGRKKLEIKRIENKSSRQVTFSKRRSGLIEKARQLSVLCDASVALLVVSSSGKLYSFSAGDNLVRILDRYGKQHAGDLKALNLQSKALSYGSHNELLELVDSKLVESNVGGVSVDTLVQLEGVLENALSLTRARKTELMLKLVDSLKEKEKLLKEENQALAGQKEKKNLAGAEADNMEMSPGQISDINLPVTLPLLN

SEQ ID NO: 702 - protein, 196 aa, Brassica napus
MGRKKLEIKRIENKSSRQVTFSKRRNGLIEKARQLSVLCDASVALLVVSASGKLYNFSAGDDLVKIVDRYGKQHADDRKALDLQSEAPKYGSHHELLELVESKLVESNSDVSVDSLVQLENHLETALSVTRARKTELLLKLVDSLKEKEKLLKEENQGLASQMEKNNLAGAEADKMEVSPGQISDINCPVTLPLLY

SEQ ID NO: 703 - protein, 196 aa, Brassica napus
MGRKKLEIKRIEKNSSRQVTFCKRRNGLIEKARQLSVLCEASVGLLVVSASDKLYSFSSGDRLEKILDRYGKKHADDLNALDLQSKSLNYSSHHELLELVESKLVESIDDVSVDSLVELEDHLETALSVTRARKAELMLKLVESLKEKENLLKEENQVLASQIEKKNLEGAEADNIEMSSGQISDINLPVTLPLLN

SEQ ID NO: 704 - protein, 427 aa, Brassica napus
MSNNIVVLDNGGGLIKAGQGGERDPLVVIPNCLFKPLSSKKFIYPPPLSDLDVDIDLTSAAVRRPIDRGYLINPDLQRDIWSHLFSSLLRITPTSSSLLLTEPPLSIPSVQRATDELVFEDFGFSSLYLANPQSLVHLYEASRQPGSILSRTQCSLVVDCGFSFTHAVPVLHNFTLNYAVKRIDLGGKAFTNYLKELVSYRSINVMDQTFLMDDAKEKLCFVSLDLHRDLNLARERRTGNVLKSTYVLPDGVTHTKGYVKDPQSAKSFLTLGLSDGGANTVMDKVDVEKKKADMNKNEIDLTNERFLVPETLFQPADLGMNQAGIAECIVRAVSSCHSYLQPVLYQSIILTGGSTLFPQLKERLERELRPLVPDHFDVKITTQEDPILGVWRGGSLLASSPDFESMCVTKAEYEELGSARCRRRFFH

SEQ ID NO: 705 - protein, 407 aa, Brassica napus
MEHQGWNFEENCNLSNNRRSSLRPQDELVELLWRDGQVVLQSQTNREQTQAQTVKHDHHQETLRSQTFLDDQETVSWLQYPPYEDQFITDGFSSHFFSTGNPLERPAPETVKHEAGPDPPDQAMPPPKFRLTNSSSSVKELGKEQYSVVTVGPSHCGSSQSHNNLDVSMRHDRSKTVNERLYHNAGSSSGGSSGCSFGKNIKEMAGVQSITTDRKRKHIIDTDGYVSQSDVIGNKSNQPSGSTRRSRAAEVHNLSERRRRDRINERMKTLQELIPHCTKTDKASILDEAIDYMKSLKLQLQVMWMGNGMVAAATAPMMLPGVQPQPFIRQMQSPVQLPRFPVMNNPGIFCQNPTQNQVFSNWFDRYIGVFPQMQAAPQPMAMLRFGSQAGQQSQQPSAPTKTTDGSR

SEQ ID NO: 706 - protein, 227 aa, Glycine max
MVREKIQIKKIDNATARQVTFSKRRRGLFKKAEELSVMCDADVALIIFSSTGKLFEYSSSSMKEILERHHLHSKNLARMEQPSLELQLVENSNCSRLSKEVAEKSHQLRQLRGEDLQGLNIEELQQLERSLETGLGRVIEKKGEKIMSEITDLQRKGMLLMEENERLKRHVAGIINGQRHGGAESENFVMDEGQSSESVTYVCNSTGPPQDFESSDTSLKLGLPYSG

SEQ ID NO: 707 - protein, 172 aa, Glycine max
MARENPLVIGGVIGDVLNPFTSSVSLTVSINNRAISNGLELRPSQVVNRPRVTVGGEDLRTFYTLVMVDADAPSPSNPVLREYLHWMVTDIPATTNASFGREVVFYESPNPSVGIHRIVFVLFQQLGRDTVITPEWRHNFNSRNFAEINNLAPVAAAYANCQRERGCGGRRY

SEQ ID NO: 708 - protein, 173 aa, Glycine max
MAKMPLEPLIVGRVIGEVLDSFTTSTKMTVSYNKKQVYNGHELFPSTVNTKPKVEIEGGDMRSFFTLIMTDPDVPGPSDPYLREHLHWIVTDIPGTTDATFGKELVSYEVPKPNIGIHRFVFVLFKQKRRQCVTPPTSRDHFNTRKFAAENDLGLPVAAVYFNAQRETAARRR

SEQ ID NO: 709 - protein, 198 aa, Glycine max
MGKKKLEIKRIENKSNRQITFSKRRKGLMKKARELSILCDAKLALLIFSSTGKLYELCNGDSLAEVVQRYWDNLGASGTDTKGLRFEIADIWSDEAFSQLVQSHFGVSELEHLSVTDLMELEKLVHSALSRIRSAKMRLMMESVENLKKKEHILRNENELLEKQIEAQKKADDVNNVVTRFIDYDQTDRVTHNLLPGL

SEQ ID NO: 710 - protein, 246 aa, Glycine max
MGRGKVELKRIENKINRQVTFAKRRNGLLKKAYELSVLCDAEVALIIFSNRGKLYEFCSGHSTAKTLERYHRCSYGALEVQHQPEIETQRRYQEYLKLKSRVEALQQTQRNLLGEELEHLDVNDLEQLERQLDSSLKQIRSNKTQQMLDQLSDLHRKEEMLLETNNILRNKLEEINVALQPTWEAREQNAPYNCHPPQTEGYYETATAHCSSTLRIGYDSSGLNEAGGAAGASAQNASEFMHGWMN

SEQ ID NO: 711 - protein, 242 aa, Glycine max
MGRGRVELKRIENKINRQVTFAKRRNGLLKKAYELSVLCDAEVALIIFSNRGKLYEFCSSSSMLKTLERYQKCNYGAPEANVSTREALELSSQQEYLKLKARYEALQRSQRNLMGEDLGPLSSKELESLERQLDSSLKQIRSTRTQFMLDQLSDLQRKEHLLSEANRSLRQRQLEGYQINPLQLNPGVEEMGYGRHPAQTHGEALFQQMECEPTLQIGYQPDPVSVVTAGPSMSNYMAGWLP

SEQ ID NO: 712 - protein, 241 aa, Glycine max
MGRGRVELKRIENKINRQVTFAKRRNGLLKKAYELSVLCDAEVALIIFSNRGKLYEFCSSSSMLKTLERYQKCNYGAPEANVSTREALELSSQQEYLKLKARYESLQRSQRNLMGEDLGPLSSKELESLERQLDSSLKQIRSTRTQFMLDQLSDLQRKEHLLSEANRSLRQRLEGYQINPLQLNPGVEEMGYGRNPAQTHGEALFQQMECEPTLQIGYQPDPVSVVTAGPSMSNYMAGWLP

SEQ ID NO: 713 - protein, 239 aa, Glycine max
MGRGRVDLKRIENKINRQVTFSKRRSGLLKKAREISVLCDADVALIVFSTKGKLFDYSNEPCMKRILERYERYSYAERQLAGDDQAPNENWVIEHEKLKARVEVLQRNQRNFMGEDLDSLNLRGLQSLEQQLDSALKLIRSRKNQAMNESISALQKKDKSLREHNNLLSKKIKDKEKELAPQEQDGLQNNMDVTSVLVTQPPESLTIGGFPEAKCNEETPTSSRPKTILPPWMPLPTNE

SEQ ID NO: 714 - protein, 436 aa, Glycine max
MSTSTNVVVLDNGGGLIKAGIGGERDPSAIVPNCLYRPPSSKKWLHLHSGDEDLTSAAVRRPMDRGYLINPDLQREIWSHLFSSVLHINPSQSSLLLTEPLFTPPSIQRSVDELVFEDFNFRALYVAHSPSLVHLHEASRNNANGLLSKAQCSLVLDAGFSFTHASPVFHNFALNYAVKRIDLGGKALTNYLKELVSFRSVNVMEETFIIDDVKEKLCFVSLDVNRDLTIARKSGKENLFRCTYVLPDGVTYTKGFVKYPDQAQRYLALREGGLHSSSPVQAQEDVNFTEIAEHPENRKRVDLTKNEFDLTNERFLVPEMIFRPADLGMNQAGLAECIVRAVNACHPHLRPVLYESIILTGGSTLFPQFAERLEKELRPLVPDDYRVKITTQEDPILGVWRGGSLLASSPDFEAMCVTKSEYEELGSARCRKRFFH

SEQ ID NO: 715 - protein, 514 aa, Glycine max
MNNSVPDWNFGSDSCVTSTNQKKPMMGVDQELVELLWQNGQVVHSQTHRKPVVNSSNLIQDDETVSWIQYPLEDPLEQEFCSNLLSELAPCEVESYKQIKPFEEGKFTKLDASSAPHVTVSSQLPTMKSSSFQDFSGIPIPAPRFHVSDSPQKNNNHLGGSCKVQNFSHFSAPLNVSSASANVHFGDKITGNMSRNEIRECSLMTVGSSYCGSNHIPQDPDASRASSNGVWTTTLSVEPEAKEKGKSEMLEPAVTSSSGGSGSSLGKTCSLSTRNQGQKRKGIDVEESEEQSEDTELKSALGNKSSQRTGSARRNRAAEVHNLSERRRRDRINEKMKALQQLIPHSSKTDKASMLEEAIEYLKSLQLQLQLMWMGSGMAPIMFPGIQHYMSQMGMGMARPPFPPPIHNPMQLPRVPLDKSVSASQTPNQTLMCQNPILGAFNYQNQMQNPALSEQYVRYMGYHLMQNASQPMNVFRYGPQGVQHSQTMITPSSNSSGNMSGAANIDEAVSGKMG

SEQ ID NO: 716 - protein, 250 aa, Oryza Sativa
MAGGGGGGGRGEGEGRAATGKRERIAIRRIDNLAARQVTFSKRRRGLFKKAEELSILCDAEVGLVVFSATGKLFQFASTSMEQIIDRYNSHSKTLQRAEPSQLDLQGEDSSTCARLKEELAETSLRLRQMRGEELHRLNVEQLQELEKSLESGLGSVLKTKSKKILDEIDGLERKRMQLIEENLRLKEQLQVSRMSRMEEMQPGPDSEIVYEEGQSSESVTNASYPRPPPDNDYSSDTSLRLGLSLFSSK

SEQ ID NO: 717 - protein, 249 aa, Oryza Sativa
MGRGPVQLRRIENKINRQVTFSKRRNGLLKKAHEISVLCDADVALIVFSTKGKLYEFSSHSSMEGILERYQRYSFDERAVLEPNTEDQENWGDEYGILKSKLDALQKSQRQLLGEQLDTLTIKELQQLEHQLEYSLKHIRSKKNQLLFESISELQKKEKSLKNQNNVLQKLMETEKEKNNAIINTNREEQNGATPSTSSPTPVTAPDPIPTTNNSQSQPRGSGESEAQPSPAQAGNSKLPPWMLRTSHT

SEQ ID NO: 718 - protein, 263 aa, Oryza Sativa
MGRGRIEIKRIENTTSRQVTFCKRRNGLLKKAYELSVLCDAEVALIVFSSRGRLYEYSNNNNVKATIDRYKKAHACGSTSGAPLIEVNAQQYYQQESAKLRHQIQMLQNTNKHLVGDNVSNLSLKELKQLESRLEKGISKIRARKNELLASEINYMAKREIELQNDNMDLRTKVNTYQIAEEEQQLQQAAAAAQQQQQNPFAVAAAQLDMKCFFPLNLFEAAAQVQAVAAQRQQIIPTELNLGYHHHLAIPGAAAADAPPPHF

SEQ ID NO: 719 - protein, 254 aa, Oryza Sativa
MDRSEMGRGRVELKRIENKINRQVTFSKRRNGLLKKAYELSVLCDAEVALIIFSSRGKLYEFGSAGINKTLEKYNSCCYNAQGSNSALAGGEHQSWYQEMSRLKTKLECLQRSQRHMLGEDLGPLSIKELQQLEKQLEYSLSQARQRKTQIMMEQVDDLRRKERQLGELNKQLKNKLEAEADSSNCRSAIQDSWVHGTVVSGGRVLNAQPPPDIDCEPTLQIGYYQFVRPEAANPRSNGGGGDQNNNFVMGWPL

SEQ ID NO: 720 - protein, 250 aa, Oryza Sativa
MGRGRVELKRIENKINRQVTFSKRRNGLLKKAYELSVLCDAEVALIIFSSRGKLYEFGSAGITKTLERYQHCCYNAQDSNNALSETQSWYHEMSKLKAKFEALQRTQRHLLGEDLGPLSVKELQQLEKQLECALSQARQRKTQLMMEQVEELRRKERQLGEINRQLKHKLEVEGSTSNYRAMQQASWAQGAVVENGAAYVQPPPHSAAMDSEPTLQIGYPHQFVPAEANTIQRSTAPAGAENNFMLGWVL

SEQ ID NO: 721 - protein, 265 aa, Oryza Sativa
MGRGKIEIKRIENKTSRQVTFCKRRNGLLKKAYELAILCDAEIALIVFSSRGRLYEFSNVNSTRSTIERYKKASASTSGSAPVIDVNSHQYFQQEAAKMRHQIQTLQNANRHLIGESIGNMTAKELKSLENRLEKGISRIRSKKHELLFSEIEYMQKREADLQNENMFLRAKVAEAERAEHDDQQAAEDDEMAPAPAVGGGSSSGTELEALPATFDTREYYQPAPPVSMLAAAAAAAAAQYSSDHHQTALHLGYFKVDSGKGGLL

SEQ ID NO: 722 - protein, 429 aa, Oryza Sativa
MTGGSGVVVLDNGGGLLKAGFGGDMNPTAVVPNCMAKPPGSKKWLVADQLQAQDVDVTGMTLRRPIDRGYLINQEVQREVWERVIRNLLQVDPNNSSLLLVEPQFNPPALQHATDELVFEELGFKSLCVADAPSLVHLYEASRQPSLFRAQCSLVVDCGFSFTHASPVLQNFTLNYAVRRMDLGGKALTNYLKELISYRSLNVMDETLLIDDAKEKLCFVSLDVPGDLRLARLSSNDNPFRCSYILPDGITYKKGFVKDLDEACRYSSLPANGESVRKDSSDSDRSKFEDKKKPELSQNEFVLTNERFLVPEMLFHPIDLGMNQAGLAECIVRAIQACHPHLQPVLFERIILTGGSTLFPRFTERLEKELRPLVPDDYQVKIIAQEDPILGAWRGGSLLAHRPDFESMCITKSEYEEMGSMRCRRRFFH

SEQ ID NO: 723 - protein, 445 aa, Oryza Sativa
MNQFVPDWNTTSMGDGFAPLGEDDGLVELLWCNGHVVMQSQAPRKPPRPEKTTAAAAAAMAEDESASWFQYPVDDVLEKDLFTELFGEMTAAGGGGGDVRRAACKEERGAVAAFQSRMMPPPWPARGKAEFGDVDDVCGVSEVVMAKMDGAAAAETVGESSMLTIGSSICGSNHVQTPPVGNGKAGAGTAGAARRAHDTATVASSSMRSRSCTAKAEPRDVAAAGVGGKRKQRGGAAMESGSPSEDVEFESAAATCSPAQKTTTAKRRRAAEVHNLSERRRRDRINEKMKALQELIPHCNKTDKASMLDEAIEYLKSLQLQLQMMWMGGGMAPPAVMFPAAGVHQYMQRMGAVGMGPPHMASLPRMPPFMAPPPAAVQSSPVVSMADPYARCLAVDHLQPPPPMHYLQGMSFYQLAAAKNLQQQQNTAEAPPPPPAGGNRAAADS

SEQ ID NO: 724 - protein, 343 aa, Brassica napus
MALTQIQIFLIVSLVSSFSLSTTLSRPLDEVTMQKRHAAWMTEHGRVYADANEKNNRYVVFKRNVESIERLNEVQYGLTFKLAVNQFADLTNEEFRSMYTGYKGNSVLSSRTKPTSFRYQHVSSDALPISVDWRKKGAVTPIKDQGSCGSCWAFSAVAAIEGVAQIKKGKLISLSEQELVDCDTNDDGCMGGYMNSAFNYTMTTGGLTSESNYPYKSTDGTCNINKTKQIATSIKGFEDVPANDEKALMKAVAHHPVSIGIAGGGTGFQFYSSGVFSGECSTHLDHGVAVVGYGKSSNGSKYWILKNSWGPKWGERGYMRIKKDTKAKHGQCGLAMNASYPTM

SEQ ID NO: 725 - protein, 346 aa, Brassica napus
MALEHIKIFLIVSLVSSFCFSTTLSRLLDHELIMQKKHDEWMAEHGRTYADMNEKNNRYVVFKRNVERIERLNNVPAGRTFKLAVNQFADLTNDEFRSMYTGYKGDSVLSSQSQTKSTSFRYQNVSSGALPIAVDWRKKGAVTPIKNQGSCGCCWAFSAVAAIEGATQIKKGKLISLSEQQLVDCDTNDFGCSGGLMDTAFEHIMATGGLTTESNYPYKGEDANCKIKSTKPSAASITGYEDVPVNDENALMKAVAHQPVSVGIEGGGFDFQFYSSGVFTGECTTYLDHAVTAVGYSQSSAGSKYWIIKNSWGTKWGEGGYMRIKKDIKDKEGLCGLAMKASYPTI

SEQ ID NO: 726 - protein, 362 aa, Glycine max
MAMKKFLWVVLSLSLVLGVANSFDFHDKDLESEESLWDLYERWRSHHTVSRSLGDKHKRFNVFKANVMHVHNTNKMDKPYKLKLNKFADMTNHEFRSTYAGSKVNHHRMFRDMPRGNGTFMYEKVGSVPASVDWRKKGAVTDVKDQGHCGSCWAFSTVVAVEGINQIKTNKLVSLSEQELVDCDTEENAGCNGGLMESAFQFIKQKGGITTESYYPYTAQDGTCDASKANDLAVSIDGHENVPGNDENALLKAVANQPVSVAIDAGGSDFQFYSEGVFTGDCSTELNHGVAIVGYGATVDGTSYWIVRNSWGPEWGEQGYIRMQRNISKKEGLCGIAMLASYPIKNSSNNPTGPSSSPKDEL

SEQ ID NO: 727 - protein, 385 aa, Oryza Sativa
MGRVVVVVAAAAVAVAVVVLLGAAAPAASAMEFGDKDVASEEALWELYERWRGQHRVARDLGEKARRFNVFKDNVRLIHEFNRRDEPYKLRLNRFGDMTADEFRRAYASSRVSHHRMFRGRGERRSGFMYAGARDLPAAVDWREKGAVGAVKDQGQCGSCWAFSTIAAVEGINAIRTSNLTALSEQQLVDCDTKTGNAGCDGGLMDNAFQYIAKHGGVAASSAYPYRARQSSCKSSAASSPAVTIDGYEDVPANSESALKKAVANQPVSVAIEAGGSHFQFYSEGVFAGKCGTELDHGVAAVGYGTTVDGTKYWIVRNSWGADWGEKGYIRMKRDVSAKEGLCGIAMEASYPIKTSPNPAPKKIKKVTDDDEDDDDEEHRHHDEL

SEQ ID NO: 728 - protein, 371 aa, Oryza Sativa
MGRVISSWRVLAVVAALMAMAAVELCAAIPFDERDLESDEALWDLYERWQEHHHVPRHHGEKHRRFGAFKDNVRYIHEHNKRGGRGYRLRLNRFGDMGREEFRATFAGSHANDLRRDGLAAPPLPGFMYEGVRDLPRAVDWRRKGAVTGVKDQGKCGSCWAFSTVVSVEGINAIRTGRLVSLSEQELIDCDTADNSGCQGGLMENAFEYIKHSGGITTESAYPYRAANGTCDAVRARRAPLVVIDGHQNVPANSEAALAKAVANQPVSVAIDAGDQSFQFYSDGVFAGDCGTDLDHGVAVVGYGETNDGTEYWIVKNSWGTAWGEGGYIRMQRDSGYDGGLCGIAMEASYPVKFSPNRVTPRRALGAKETQ

SEQ ID NO: 729 - RNA, 225 nt, Artificial Sequence
  Synthetic RNA
aagaggaagccgaaaccgaagaacaagccaacaacgacgacgacgcaccgaaaagcccgaagacccacaccgaacacaacgaggcgaaccggagcaaaagggaggaaaaaccgagaaccaggccaagaaagcaggaagaaggcagcaacaaaggaggacaccgaccaaagggaagacacccaagcaagacagaggcccagcaaacaacgagcccagaccaggcac

SEQ ID NO: 730 - RNA, 208 nt, Artificial Sequence
  Synthetic RNA
agaacaacaggccagacaccaccaccacaggaagacacagacccaaagaccaacccacaaccacaccccaacccgcccacaagacacgacacccaacccaacaacaagcaacccgaccacaacaacacaagcaccccccaacgaacgcccggagccccgcgccccccccacaaaacaaggccaaagaaaccaaaccacaccaccaaga

SEQ ID NO: 731 - RNA, 202 nt, Artificial Sequence
  Synthetic RNA
gacacccaagcagaaccgaccggcggccccacccaccaaccggaaaaagggacaaggagcggcgagaaccagagaagagcagcggggacacacaggcagcagccacaaaaggcaagaagggagaggaaacgaggcgacaagggcaaggaccgggaaagaaagcagacaagcacaccagaaaagaagaggggaacaggacaaa

SEQ ID NO: 732 - RNA, 225 nt, Artificial Sequence
  Synthetic RNA
aaaccaagaagaaaagggagggaaaaccgccagccaacgggggcagagagaccccaggagccgggggaccccagaaaagagaaccacccgagaccggcaacacacggccaagccacccaggaagcgccccccggaacgggcagcaggccaaaaagagacgaggagacccaagaagacaaagggagacagaaaccaccagagccccgcaaccggacccaaaagagg

SEQ ID NO: 733 - RNA, 229 nt, Artificial Sequence
  Synthetic RNA
accaaaggaggggaagaaagcagagagaaggagaaccacaaaacaaagaagacagagaaggcaaggccggaagacaagacggaaacacaagaccggcagccgaggcgccacgggaccaacaacggccgcccagcaaacacacagcagagcaagcccaggccacaccaaaacgccagaacgacgacacaacaacgcaacacaaacggaaggcaggcacgcaaagccaagc

SEQ ID NO: 734 - RNA, 245 nt, Artificial Sequence
  Synthetic RNA
aacaaacaacgcaagggaaaaaacaagggggggggggcaagaggcacacaaccggaagcgaaggggagcaagagagggagacagaccaaacagagaagagaagaaaaagaagggagaaagaggcacaagcagaaaggaacgagggaaaaggcaagagaaagggcaagggaaagaacaagagagaagagagaaccggagagacgcgagcacaaaccgaaccaccgcgggacacacacacccccgga

SEQ ID NO: 735 - RNA, 234 nt, Artificial Sequence
  Synthetic RNA
gaaaggaacgagggaaaaggcaagagaaagggcaagggaaagaacaagagagaagagagaaccggagagacgcgagcacaaaccgaaccaccgcgggacacacacacccccggaggcacccagaggcgacaagaaccaaagccacaacggaaggagcaaagggagaggacaggcgcagaagaaacggcgccagaacaagggagcccaacaggcaacccacaaccaggaacccag

SEQ ID NO: 736 - RNA, 246 nt, Artificial Sequence
  Synthetic RNA
ggagagaagaagaaaaaagcaagaaggagaagagaaggaagaaggcaaaaaagacagaaacaacgggcagcagggcaccccaagccaaaaacgccccccccaccccccccacccccccaacccaaacgcgccaacaacaacaccccacaaaagaggcccaccgacgagcggggcggaacggaggccagaacggcggcgccaccaccgccaccccgaccacccgacaagcccccaaccagcaccgag

SEQ ID NO: 737 - RNA, 227 nt, Artificial Sequence
  Synthetic RNA
agcaacagcagcgcaacgagccagccagcaccaggagaccaaaggaaagcagcgggaccccgccacaccgaggaaaggagcccgccggaacacaacccagggccaagcagaaagaggggagacccgcaaaagggagaaagggagcaagccggagcgagagagggcaggaacaccgaaaaggcagcaacgaacgaaaagcgaaggacaggggaagagaaaggcaagaa

SEQ ID NO: 738 - RNA, 237 nt, Artificial Sequence
  Synthetic RNA
gcggaccagagaccagaacgaaaccccagacaacaagcccgagagaccagagaggcaaacaagcccgaagaccaaccccaccgggcaggaaaaagaaaagcggcgggaaggaggaaaagacgagggggaaggcacgaggagagccccaagcgcaagccaggccgggggacacagaaccgccaccgccaagagagggaaacggagacgcgaaccaggccgcaacggccgggacaaaca

SEQ ID NO: 739 - RNA, 193 nt, Artificial Sequence
  Synthetic RNA
agagggacacaaaagacacgcaaccagagagagagagaggggggacacagaaccagggacagcgagccaggacacgccagcacggcggaggggggggacccaacacgccgaggagcagcagcagcggacaaccagagagaacgaaacccaaacccccgcagccaaaacaaccaccccagaagccaaacccaaa

SEQ ID NO: 740 - RNA, 210 nt, Artificial Sequence
  Synthetic RNA
caaaaaaccaaacaggacaccaagaccaggaaggcaaagagcaaaagaccgcaacgggccaggcaagaagccaaaaccggagccaacccacaaagaagaggagaaggcccaccaagagccagaccgacaagcccaaaaacaacaggggggccagacaccaagccaagaggggaggaggagcaacacaaagcacaacacaaaacaacgggg

SEQ ID NO: 741 - RNA, 196 nt, Artificial Sequence
  Synthetic RNA
gcccgaaccaggggccaacgaaggaggcacgagcccaggagaaccccgacaccaaggccggcggcgacaaaggaaccccaccgaccacacaagcaaaagcgaaaaaaaagacaggagaggagcaacaagaaggcgagagaggcacgaagagccccagaaacaacgagagagaaggcaacagcgagaccacgcaaga

SEQ ID NO: 742 - RNA, 229 nt, Artificial Sequence
  Synthetic RNA
ccacccagcgcgccgccccaaccccacccaccacccacagagcccagcgggccggcgggggcacccaccagagagaagagaccaagcacaaccaagcagcagccgccccccgaccacccccccacacaagcgagcgcccaggaggcgccgcaggccggcaggccggacacacgacaagcccacacggcacaccccccccgcccgcacgcgagaggggccggagagggag

SEQ ID NO: 743 - RNA, 260 nt, Artificial Sequence
  Synthetic RNA
ccaccccacaccaccaccacccaccccccccccccccccccccccccccgccgccgccacgacgcccgccgcgccggccagcacccccaggacggagggagccgcagggcagcagcggcggcggcggaggaggacggggcaggcgggcaaggcgcgacgccgggggccccggcgcgacggagcggcggcggccgcggcggcgaggaaggaccggcacagcaagaaagcaccgccggcgggagagggaccggcggagcggc

SEQ ID NO: 744 - RNA, 246 nt, Artificial Sequence
  Synthetic RNA
cgcggggcagggacgggcgggaggggggaggccacggcggagcaggcgccgccacaacaccaggggcaccccagcccccacccgaccgcgccgcaccgacccgcgccagaacaccgcgcacgccgccgacgcgggccaaggcgacgccacgccgccaggcggcggggcgcgcacgcgcgcggcgcgccgccgccaaggccggggcgcagcgggccacaccgggcccccgccgcgccaacaacacgc

SEQ ID NO: 745 - RNA, 228 nt, Artificial Sequence
  Synthetic RNA
gggcaggggcagcaggagaggggaagcggcggggcggggcgacggcgcggggaggcgcgcggcgcgccggccgccgccacgccgcggcgccgccgccccggccccgcggcgacgccgcacccgccacaacaggccgcacgcccaacgagccccgcgcaaaggagagggccagccgagaccagcacggcggaacggaacagacccgccgacgagcaaacgcggcgggcg

SEQ ID NO: 746 - RNA, 262 nt, Artificial Sequence
  Synthetic RNA
cgacggggagaacccggcgaggaggagggaggggacgacgaggaggaggggagagcaagccaaggcggaggagagcaggcggcccggcgcggacgccggaggaaccacccacaagagggggccccaaccacgccggcaagccaagcgcaccagcccgccgaggcgacggcgcgccggcggcggcggccaacgagcggccaagccggagaacccccaacaagcgccgccgcacccgccaccggcgcggcgagccccgcagccc

SEQ ID NO: 747 - RNA, 229 nt, Artificial Sequence
  Synthetic RNA
gacgacgagagcggcagcaccgggcaagaacggcggccggcgagagcggcggcgccgccagccagccgccgccgaggccaccgcacacccagagggaggaagggaggaggaaggaacacaggcgccgaggcgcccacgcgaccagaacagggcggcagaggcgcaagacaaaaaaaaaaaaacagagagcaaaaagccagacccggcggagaggacgcacaacgcacaa
